(19) United States
(12) Patent Application Publication
(10) Pub. No.: US 2009/0099075 A1
(43) Pub. Date: Apr. 16, 2009

(54) Chimeric Keratin-Binding Effector Proteins

(75) Inventors: Heiko Barg, Speyer (DE); Burghard Liebmann, Bensheim (DE); Heike Reents, Speyer (DE); Arne Ptock, Ludwigshafen (DE)

Correspondence Address: CONNOLLY BOVE LODGE & HUTZ, LLP, P O BOX 2207, WILMINGTON, DE, 19899, US

(73) Assignee: BASF SE, Ludwigshafen (DE)

(21) Appl. No.: 12/094,889

(22) PCT Filed: Nov. 15, 2006
(86) PCT No.: PCT/EP2006/068474

§ 371 Date: May 23, 2008

(30) Foreign Application Priority Data
Nov. 24, 2005 (EP) 05111240.7
Jun. 30, 2006 (EP) 06116399.4

(51) Int. Cl. A61K 38/17; C07K 14/00; C07H 21/00; C12N 1/20

(52) U.S. Cl. 514/12; 530/353; 536/23.1; 435/252.8; 435/252.5; 536/23.5

(57) ABSTRACT

The invention relates to chimeric keratin-binding effector proteins and their use in dermocosmetics.

[0001] The invention relates to chimeric keratin-binding effector proteins and their use in dermocosmetics.

[0002] Vertebrate cells comprise filaments, of which one group is constructed from keratins. Specific proteins, such as, for example, desmoplakin or plakophilin 1, bind to these keratins, which also occur in hair, skin and fingernails and toenails, by means of a specific sequence motif, a so-called keratin-binding domain (Fontao L, Favre B, Riou S, Geerts D, Jaunin F, Saurat J H, Green K J, Sonnenberg A, Borradori L., Interaction of the bullous pemphigoid antigen 1 (BP230) and desmoplakin with intermediate filaments is mediated by distinct sequences within their COOH terminus., Mol Biol Cell. 2003 May; 14(5):1978-92. Epub 2003 Jan 26; Hopkinson S B, Jones J C., The N-terminus of the transmembrane protein BP180 interacts with the N-terminal domain of BP230, thereby mediating keratin cytoskeleton anchorage to the cell surface at the site of the hemidesmosome, Mol Biol Cell. 2000 January; 11(1):277-86; Smith E. A., Fuchs E., Defining the Interactions Between Intermediate Filaments and Desmosomes, The Journal of Cell Biology, Volume 141, 1998).

[0003] The human skin is subject to certain aging processes, some of which are attributable to intrinsic processes (chronoaging) and some of which are attributable to exogenous factors (environmental, e.g. photoaging). In addition, temporary or persisting changes in the appearance of the skin can arise, such as acne, greasy or dry skin, keratoses, rosacea, photosensitive, inflammatory, erythematous, allergic or autoimmune reactions, such as dermatoses and photodermatoses.

[0004] Exogenous factors include, in particular, sunlight or artificial sources of irradiation with a comparable spectrum, and also free-radical or ionic compounds which can arise as a result of the radiation. These factors also include cigarette smoke and the reactive compounds present therein, such as ozone, free radicals, singlet oxygen and other reactive oxygen or nitrogen compounds which disturb the natural physiology or morphology of the skin.

[0005] For avoiding and treating the abovementioned damage, disorders, and for the care and decorative treatment and beautifying of the skin, hair, fingernails and toenails, a large number of cosmetic and pharmaceutical preparations have been made available by the cosmetic and pharmacological industry. The use of proteins as constituent of these preparations has been known for a long time. On account of their special properties, proteins and enzymes have not only a wide field of use in the production of such compositions, rather, on account of enzymatic activities or structure-imparting properties, they bring about positive physiological changes in skin and hair.

[0006] However, proteins are usually not able to enter into a fixed bond with the surface structures of animal organisms, i.e. binding to e.g. skin, hair is ensured only for a few proteins. Thus, as a result of applying a protein with certain physiological or decorative properties, it cannot be ensured that the proteins arrive at their site of action and remain there for an adequate time which is required for the desired physiological or decorative effect.

[0007] The German patent application with the application number DE 102005011988.3 describes the use of keratin-binding domains in cosmetic preparations. The international patent application with the application number PCT/EP/05/005599 reveals that keratin-binding domains can also be coupled with effector molecules.

[0008] It was therefore an object of the present invention to provide new types of proteins which can be used dermocosmetically for application to skin, hair, fingernails and toenails. Advantageously, proteins or polypeptides were to be identified which have a keratin-binding property, exert a dermocosmetic effect and are also suitable for producing cosmetic and/or dermocosmetic formulations or preparations.

### SUMMARY OF THE INVENTION

[0009] The invention firstly provides chimeric keratin-binding effector proteins comprising (a) at least one keratin-binding polypeptide (i) and (b) at least one further effector polypeptide (ii).

[0010] In a particularly preferred embodiment, these are keratin-binding polypeptides (i) which have a binding affinity to human skin keratin, hair keratin or nail keratin. Preferably, the keratin-binding polypeptide (i) used according to the invention comprises
[0011] a) at least one of the sequences according to SEQ ID No.: 2, 4, 6, 8, 10, 12, 14, 16, 18, 20, 22, 24, 26, 28, 30, 32, 34, 36, 38, 40, 42, 44, 46, 48, 50, 52, 54, 56, 58, 60, 62, 64, 66, 68, 70, 72, 74, 76, 78, 80, 82, 84, 86, 88, 90, 92, 94, 96, 98, 100, 102, 104, 106, 108, 110, 112, 114, 116, 118, 120, 122, 124, 126, 128, 130, 132, 134, 136, 138, 140, 146, 150, 153, 156, 157, 158, 160, 162, 164, 166, 213 or 215, or
[0012] b) a polypeptide which is at least 40% identical to at least one of the sequences according to SEQ ID No.: 2, 4, 6, 8, 10, 12, 14, 16, 18, 20, 22, 24, 26, 28, 30, 32, 34, 36, 38, 40, 42, 44, 46, 48, 50, 52, 54, 56, 58, 60, 62, 64, 66, 68, 70, 72, 74, 76, 78, 80, 82, 84, 86, 88, 90, 92, 94, 96, 98, 100, 102, 104, 106, 108, 110, 112, 114, 116, 118, 120, 122, 124, 126, 128, 130, 132, 134, 136, 138, 140, 146, 150, 153, 156, 157, 158, 160, 162, 164, 166, 213 or 215 and is able to bind keratin.

[0013] The keratin-binding polypeptide (i) can preferably be encoded by a nucleic acid molecule comprising at least one nucleic acid molecule chosen from the group consisting of:
[0014] c) nucleic acid molecule which encodes a polypeptide comprising the sequence shown in SEQ ID Not: 2, 4, 6, 8, 10, 12, 14, 16, 18, 20, 22, 24, 26, 28, 30, 32, 34, 36, 38, 40, 42, 44, 46, 48, 50, 52, 54, 56, 58, 60, 62, 64, 66, 68, 70, 72, 74, 76, 78, 80, 82, 84, 86, 88, 90, 92, 94, 96, 98 100, 102, 104, 106, 108, 110, 112, 114, 116, 118, 120, 122, 124, 126, 128, 130, 132, 134, 136, 138, 140, 146, 150, 153, 156, 157, 158, 160, 162, 164, 166, 213 or 215;
[0015] d) nucleic acid molecule which comprises at least one polynucleotide of the sequence shown in SEQ ID No.: 1, 3, 5, 7, 9, 11, 13, 15, 17, 19, 21, 23, 25, 27, 29, 31, 33, 35, 37, 39, 41, 43, 45, 47, 49, 51, 53, 55, 57, 59, 61, 63, 65, 67, 69, 71, 73, 75, 77, 79, 81, 83, 85, 87, 89, 91, 93, 95, 97, 99, 101, 103, 105, 107, 109, 111, 113, 115, 117, 119, 121, 123, 125, 127, 129, 131, 133, 135, 137, 139, 145, 149, 152, 159, 161, 163, 165, 212 or 214;
[0016] e) nucleic acid molecule which encodes a polypeptide according to the sequences SEQ ID No.: 2, 4, 6, 8, 10, 12, 14, 16, 16, 20, 22, 24, 26, 28, 30, 32, 34, 36, 38, 40, 42, 44, 46, 48, 50, 52, 54, 56, 58, 60, 62, 64, 66, 68, 70, 72, 74, 76, 78, 80, 82, 84, 86, 88, 90, 92, 94, 96, 98, 100, 102, 104, 106, 108, 110, 112, 114, 116, 118, 120, 122, 124, 126, 128, 130, 132, 134, 136, 138, 140, 146, 150, 153, 156, 157, 158, 160, 162, 164, 166, 213 or 215;
[0017] f) nucleic acid molecule with a nucleic acid sequence corresponding to at least one of the sequences according to SEQ ID No.: 1, 3, 5, 7, 9, 11, 13, 15, 17, 19, 21, 23, 25, 27, 29, 31, 33, 35, 37, 39, 41, 43, 45, 47, 49, 51, 53, 55, 57, 59, 61, 63, 65, 67, 69, 71, 73, 75, 77, 79, 81, 83, 85, 87, 89, 91, 93, 95, 97, 99, 101, 103, 105, 107, 109, 111, 113, 115, 117, 119, 121, 123, 125, 127, 129, 131, 133, 135, 137, 139, 145, 149, 152, 159, 161, 163, 165, 212 or 214, or a nucleic acid molecule derived therefrom by substitution, deletion or insertion which encodes a polypeptide which is at least 40% identical to at least one of the sequences according to SEQ ID No.: 2, 4, 6, 8, 10, 12, 14, 16, 18, 20, 22, 24, 26, 28, 30, 32, 34, 36, 38, 40, 42, 44, 46, 48, 50, 52, 54, 56, 58, 60, 62, 64, 66, 68, 70, 72, 74, 76, 78, 80, 82, 84, 86, 88, 90, 92, 94, 96, 98, 100, 102, 104, 106, 108, 110, 112, 114, 116, 118, 120, 122, 124, 126, 128, 130, 132, 134, 136, 138, 140, 146, 150, 153, 156, 157, 158, 160, 162, 164, 166, 213 or 215 and is able to bind to keratin;
[0018] g) nucleic acid molecule which encodes a polypeptide which is recognized by a monoclonal antibody directed toward a polypeptide which is encoded by the nucleic acid molecules according to (c) to (e);
[0019] h) nucleic acid molecule coding for a keratin-binding protein which, under stringent conditions, hybridizes with a nucleic acid molecule according to (c) to (e);
[0020] i) nucleic acid molecule coding for a keratin-binding protein which can be isolated from a DNA bank using a nucleic acid molecule according to (c) to (e) or part fragments thereof comprising at least 15 nt, preferably 20 nt, 30 nt, 50 nt, 100 nt, 200 nt or 500 nt as probe under stringent hybridization conditions; and
[0021] j) nucleic acid molecule which can be produced by backtranslating one of the amino acid sequences shown in the sequences SEQ ID No.: 2, 4, 6, 8, 10, 12, 14, 16, 18, 20, 22, 24, 26, 28, 30, 32, 34, 36, 38, 40, 42, 44, 46, 48, 50, 52, 54, 56, 58, 60, 62, 64, 66, 68, 70, 72, 74, 76, 78, 80, 82, 84, 86, 88, 90, 92, 94, 96, 98, 100, 102, 104, 106, 108, 110, 112, 114, 116, 118, 120, 122, 124, 126, 128, 130, 132, 134, 136, 138, 140, 146, 150, 153, 156, 157, 158, 160, 162, 166, 213 or 215.

[0022] The present invention preferably provides keratin-binding effector proteins where the effector polypeptide (ii) is chosen from the group consisting of enzymes, antibodies, effector-binding proteins, fluorescent proteins, antimicrobial peptides and self-assembling proteins.

[0023] The present invention particularly preferably provides keratin-binding effector proteins which comprise, as effector polypeptides (ii), enzymes chosen from the group consisting of oxidases, peroxidases, proteases, tyrosinases, lactoperoxidase, lysozyme, amyloglycosidases, glucose oxidases, superoxide dismutases, photolyases and catalases.

[0024] Moreover, preference is given to keratin-binding effector proteins comprising, as effector polypeptide (ii), a silk protein, particularly preferably silk proteins which comprise at least one of the sequences according to SEQ ID No.: 151, 201, 202, 203, 204, 205, 206, 207, 208, 209 or 210, or correspond to a polypeptide which is at least 40% identical to at least one of the sequences according to SEQ ID No.: 151, 201, 202, 203, 204, 205, 206, 207, 208, 209 or 210.

[0025] In addition, the invention relates to those keratin-binding effector proteins comprising silk proteins which are encoded by a nucleic acid molecule comprising at least one nucleic acid molecule chosen from the group consisting of:
[0026] k) nucleic acid molecule which encodes a polypeptide comprising the sequence shown in SEQ ID No.: 151, 201, 202, 203, 204, 205, 206, 207, 208, 209 or 210;
[0027] l) nucleic acid molecule which comprises at least one polynucleotide of the sequence shown in SEQ ID No.: 150;
[0028] m) nucleic acid molecule which encodes a polypeptide according to the sequences SEQ ID No.: 151, 201, 202, 203, 204, 205, 206, 207, 208, 209 or 210;
[0029] n) nucleic acid molecule with a nucleic acid sequence according to SEQ ID No. 150 or a nucleic acid molecule derived therefrom by substitution, deletion or insertion which encodes a polypeptide which is at least 40% identical to the sequence according to SEQ ID No.: 151;
[0030] o) nucleic acid molecule which encodes a polypeptide which is recognized by a monoclonal antibody directed toward a polypeptide which is encoded by the nucleic acid molecules according to (k) to (m);
[0031] p) nucleic acid molecule coding for a keratin-binding protein which hybridizes under stringent conditions with a nucleic acid molecule according to (k) to (m);
[0032] q) nucleic acid molecule coding for a keratin-binding protein which can be isolated from a DNA bank using a nucleic acid molecule according to (k) to (m) or part fragments thereof comprising at least 15 nucleotides as probe under stringent hybridization conditions; and
[0033] r) nucleic acid molecule which can be produced by backtranslating one of the amino acid sequences shown in the sequences SEQ ID No.: 151, 201, 202, 203, 204, 205, 206, 207, 208, 209 or 210.

[0034] In a preferred embodiment of the present invention, the chimeric keratin-binding effector proteins according to the invention are proteins in which the above-described polypeptides (i) and (ii) are linked together by means of translation fusion.

[0035] The invention further preferably provides keratin-binding effector proteins in which the above-described polypeptides (i) and (ii) are linked together by means of a chemical coupling reaction. Preference is given here to those keratin-binding effector proteins in which the effector polypeptide (ii) is covalently bonded to side chains of internal amino acids the C-terminus or the N-terminus of the keratin-binding polypeptide (i).

[0036] In addition, the present invention provides the above-described keratin-binding effector proteins where the effector polypeptide (ii) and the keratin-binding polypeptide (i) are joined together by means of a spacer element. These are preferably keratin-binding effector proteins which are joined together by means of a spacer element where the spacer element is a crosslinker.

[0037] Also preferred are keratin-binding effector proteins comprising a spacer element where the spacer element is an at least bifunctional linker which covalently joins together the keratin-binding polypeptide (i) and the effector polypeptide by binding to side chains of internal amino acids, the C-terminus or the N-terminus of said polypeptides. Besides the keratin-binding effector proteins already specified, preference is also given to those in which the spacer element linking the polypeptides (i) and (ii) is a polypeptide.

[0038] The invention further provides the use of the above-described keratin-binding effector proteins in dermocosmetics, which are preferably skin protection compositions, skincare compositions, skin cleansing compositions, hair protection compositions, haircare compositions, hair cleansing compositions, hair colorants or products of decorative cosmetics.

[0039] The present invention further provides the abovementioned dermocosmetics comprising one of the above-described keratin-binding effector molecules.

[0040] In addition, the invention provides proteins according to the amino acid sequences shown in SEQ ID No.: 168, 176, 182, 188, 194 and 200.

[0041] The present invention likewise provides nucleic acid molecules according to the sequence shown in SEQ ID No.: 167, 175, 181, 187, 193 or 199.

[0042] Furthermore, the present invention provides DNA expression cassettes comprising a nucleic acid molecule with a nucleic acid sequence according to the sequence shown in SEQ ID No: 167, 175, 181, 187, 193 or 199.

[0043] The present invention likewise provides vectors comprising a DNA expression cassette comprising a nucleic acid molecule with a nucleic acid sequence according to the sequence shown in SEQ ID No.: 167, 175, 181, 187, 193 or 199.

[0044] Moreover, the present invention provides transgenic cells comprising
[0045] s) at least one of the abovementioned vectors, or
[0046] t) at least one of the abovementioned expression cassettes, or
[0047] u) at least one of the abovementioned nucleic acid molecules coding for a polypeptide comprising at least one polypeptide which is encoded by a nucleic acid molecule according to the sequence shown in SEQ ID No.: 167, 175, 181, 187, 193 or 199.

### DEFINITIONS

[0048] For the purposes of the present invention, “antibodies” are proteins which humans and jaw-bearing vertebrates produce to protect against antigens (infection pathogens or biological material alien to the body). They are a central constituent of the immune system of higher eukaryotes and are secreted by a class of white corpuscles, the B cells. They occur in the blood and in the extracellular liquid of tissue.

[0049] For the purposes of the present invention “backtranslation” means the translation of a protein sequence into a nucleic acid sequence coding for this protein. The backtranslation is thus a process of decoding an amino acid sequence into the nucleic acid sequence corresponding to it. Customary methods are based on creating codon usage tables for a certain organism, which are produced by computer-aided sequence comparisons. Using the codon usage tables it is possible to determine the codons used most frequently for a certain amino acid for a specific organism. Protein backtranslation can be carried out using computer algorithms which are known to the person skilled in the art and specifically generated for this purpose (Andrés Moreira and Alejandro Maats. TIP: protein backtranslation aided by genetic algorithms. Bioinformatics, Volume 20, Number 13 Pp. 2148-2149 (2004); G Pesole, M Attimonelli, and S Liuni. A backtranslation method based on codon usage strategy. Nucleic Acids Res. 1988 March 11; 16(5 Pt A): 1715-1728.).

[0050] For the purposes of the present invention, “chimeric keratin-binding effector proteins” means proteins comprising a keratin-binding polypeptide, protein or protein domain (i) and an effector polypeptide, effector protein, or effector protein domain (ii), where the specified polypeptides, proteins or protein domains are linked together artificially. Linked artificially means a link produced using biotechnological or chemotechnological methods, as is not realized in the living world, e.g. the organisms in which said polypeptides, proteins or protein domains occur naturally. For producing the chimeric keratin-binding effector proteins, in the case of biotechnological processes, translation fusion is preferred, and in the case of chemotechnological processes, the processes assumed under the term “chemical coupling reaction” are preferred.

[0051] “Translation fusion” is understood as meaning the production of a chimeric nucleic acid molecule in which the linking of at least two nucleic acid molecules coding for a polypeptide, protein or a protein domain is realized in such a way that, as a result of the translation event of this chimeric nucleic acid molecule, a continuous polypeptide chain can be formed.

[0052] “Decorative cosmetics” means cosmetic auxiliaries which are not primarily used for the care, but for beautifying or improving the appearance of skin, hair and/or fingernails and toenails. Auxiliaries of this type are appropriately known to the person skilled in the art and comprise, for example, kohl pencils, mascara, eye shadows, tinted day creams, powders, concealing sticks, blusher, lipsticks, lipliner sticks, make-up, nail varnish, glamour gel etc. Also included are compositions suitable for coloring skin or hair.

[0053] “Dermocosmetics”, also referred to as “cosmeceuticals” or “dermocosmetic compositions” or “dermocosmetic preparations” are compositions or preparations (i) for protecting against damage to skin, hair and/or fingernails and toenails, (ii) for treating existing damage to skin, hair and/or fingernails or toenails and (iii) for the care of skin, hair and/or fingernails or toenails, comprising skin cosmetic, nail cosmetic, hair cosmetic, dermatological, hygiene or pharmaceutical compositions, preparations and formulations and for improving the feel of the skin (sensory properties). Compositions for decorative cosmetics are explicitly included. Also included are compositions for skincare, with which the pharmaceutically dermatological intended use is achieved taking into consideration cosmetic points of view. Compositions or preparations of this type are used for helping, preventing and treating skin disorders and, besides the cosmetic effect, develop a biological effect. For the purposes of the definition given above, “dermocosmetics” comprise, in a cosmetically compatible medium, suitable auxiliaries and additives which are familiar to the person skilled in the art and can be found in cosmetics handbooks, for example Schrader, Grundlagen und Rezepturen der Kosmetika [Fundamentals and formulations of cosmetics], Hüthig Veriag, Heidelberg, 1989, ISBN 3-7785-1491-1, or Umbach, Kosmetik: Entwicklung, Herstellung und Anwendung kosmetischer Mittel [Cosmetics: development, manufacture and use of cosmetic compositions], 2nd extended edition, 1995, Georg Thieme Verlag, ISBN 3 13 712602 9.

[0054] For the purposes of the present invention, “dermocosmetic active ingredients” or “dermocosmetically active ingredients” are the active ingredients present in dermocosmetics according to the definition given above which are involved in realizing the individual mode of action of the dermocosmetics. These are thus, for example, active ingredients which bring about protection against damage to skin, hair and/or fingernails or toenails, (ii) can be used for treating existing damage to skin, hair and/or fingernails and toenails, (iii) have skin, hair and/or fingernails or toenail caring properties and (iv) are used for decorative beautification or improvement in the appearance of skin, hair and/or fingernails and toenails. Also included are active ingredients for skincare with which the pharmaceutically dermatological intended use is achieved taking cosmetic points of view into consideration. Active ingredients of this type are used for helping, preventing and treating skin disorders and, besides the cosmetic effect, develop a biological effect. Active ingredients of this type are chosen, for example, from the group of natural or synthetic polymers, pigments, humectants, oils, waxes, proteins, enzymes, minerals, vitamins, sunscreens, dyes, perfumes, antioxidants, peroxide decomposers and preservatives and pharmaceutical active ingredients which are used for helping, preventing and treating skin disorders and have a biological effect which heals, prevents damage, regenerates or improves the general condition of the skin.

[0055] For the purposes of the present invention, “expression cassette” means a nucleic acid molecule comprising a nucleic acid molecule which is linked in a functional manner to at least one genetic control element (for example a promoter) which ensures an expression in a cell or an organism, preferably prokaryotic cells, yeasts, or cell cultures of eukaryotic cells.

[0056] “Functional linking” means, for example, the sequential arrangement of a promoter with the nucleic acid molecule to be expressed (for example coding for a keratin-binding effector protein) and, if appropriate, further regulatory elements, such as, for example, a terminator, in such a way that each of the regulatory elements can fulfill its function during the transgenic expression of the nucleic acid molecule. For this, a direct linkage in the chemical sense is not necessarily required. Genetic control sequences, such as, for example, enhancer sequences, can exert their function on the target sequence also from more distant positions or even from other DNA molecules. Preference is given to arrangements in which the nucleic acid molecule to be expressed transgenically is positioned behind the sequence acting as promoter, so that both sequences are covalently bonded together. Preferably, the distance between the promoter sequence and the nucleic acid sequence to be expressed transgenically here is less than 200 base pairs, particularly preferably smaller than 100 base pairs, very particularly preferably smaller than 50 base pairs.

[0057] Producing a functional linkage and also producing an expression cassette can be realized using customary recombinant and cloning techniques, as described, for example, in Maniatis T, Fritsch E F and Sambrook J (1989) Molecular Cloning: A Laboratory Manual, Cold Spring Harbor Laboratory, Cold Spring Harbor (NY), in Silhavy T J, Berman M L and Enquist L W (1984) Experiments with Gene Fusions, Cold Spring Harbor Laboratory, Cold Spring Harbor (NY), in Ausubel F M et al. (1987) Current Protocols in Molecular Biology, Greene Publishing Assoc. and Wiley Interscience and in Gelvin et al. (1990) In: Plant Molecular Biology Manual. However, between the two sequences it is also possible for further sequences, which, for example, have the function of a linker with certain restriction enzyme cleavage sites or a signal peptide, to be positioned. The insertion of sequences can also lead to the expression of fusion proteins. Preferably, the expression cassette, consisting of a linkage of promoter and nucleic acid sequence to be expressed can be present in integrated form in a vector and be inserted by, for example, transformation, into a plant genome.

[0058] The term “cell” refers to an individual cell. The term “cells” refers to a population of cells. This population may be present in a synchronized or nonsynchronized manner. “Cell” or “cells” includes single-cell organisms and also cells as constituent of a multicellular complex or organism.

[0059] “Transgenic” in connection with a cell or an organism means, with regard to a nucleic acid molecule, the polypeptide encoded therefrom, an expression cassette or a vector comprising said nucleic acid molecule or a cell or an organism transformed with said nucleic acid molecule, expression cassette or vector, all those cells or organisms achieved by genetic engineering methods in which the nucleic acid molecule coding either
[0060] a) for the keratin-binding polypeptide (i), or
[0061] b) the effector protein, or
[0062] c) (a) and (b)
   are not located in their natural genetic environment or have been modified by genetic engineering methods, in which case the modification may, for example, be a substitution, addition, deletion or insertion of one or more nucleotide radicals. Natural genetic environment means the natural chromosomal locus in the original organism or the presence in a genomic library. In the case of a genomic library, the natural, genetic environment of the nucleic acid sequence is at least partially retained. The environment flanks the nucleic acid sequence at least on one side and has a sequence length of at least 50 bp, preferably at least 500 bp, particularly preferably at least 1000 bp, very particularly preferably at least 5000 bp. A naturally occurring expression cassette—for example the naturally occurring combination of the keratin-binding polypeptide promoter with the corresponding gene coding for the keratin-binding polypeptide—becomes a transgenic expression cassette if the latter is modified by non-natural, synthetic (“artificial”) methods such as, for example, a mutagenization. Appropriate methods are described (U.S. Pat. No. 5,565,350; WO 00/15815).

[0063] For the purposes of the present invention, “effector polypeptide” means proteinogenic dermocosmetic active ingredients which have a certain foreseeable effect, preferably a biological or physiological, protective, preventative and/or care effect on skin, hair and/or fingernails and toenails. The effector molecules are preferably proteinogenic compounds such as polypeptides, proteins or enzymes. Particular preference is given to self-assembling proteins, and very particular preference is given to silk proteins.

[0064] For the purposes of the present invention, “keratin” means intermediate filaments constructed from rope-like protein complexes. Intermediate filaments are constructed from many proteins of the same type (monomers) which position themselves in parallel to give a tube-like structure. Intermediate filaments are bound to give relatively large bundles (tonofibrils). Intermediate filaments form the cytoskeleton of the cell with the microtubules and actin filaments. A distinction is made between five types of intermediate filaments: acidic and basic keratins, desmins, neurofilaments and lamins. Of specific preference for the purposes of the present invention are the acidic and basic keratins occurring in the epithelia (single or multiple cell layers which cover all external body surfaces of multicellular animal organisms). “Keratin” or “keratins” (also: horny substance, scleroprotein) means a protein which is responsible for the stability and shape of the cells. This protein is a constituent of mammal skin, hair and nails. The strength of keratin is increased through fiber formation: the individual amino acid chains form a right-handed alpha-helix, and every three of these helixes form a left-hand superhelix (=protofibrils). Eleven protofibrils combine to give a microfibril—these combine in turn to give bundles and form macrofibrils which, for example, surround the cells of the hair.

[0065] “Keratin-binding polypeptide” means a polypeptide or a protein which has the property of binding to keratin, within the meaning of the definition given above. Keratin-binding polypeptides are thus also intermediate filament-associated proteins. These keratin-binding polypeptides have a binding affinity toward the keratin or the macrostructures consisting of keratin such as protofibrils, microfibrils or macrofibrils. In addition, keratin-binding polypeptides are understood as meaning those polypeptides which have a binding affinity to skin, hair and/or fingernails or toenails of mammals.

[0066] “Keratin-binding polypeptides” are also polypeptides which, within a mammal organism, have a biological function associated with the binding of keratin, keratin fibers, skin or hair. Keratin-binding polypeptides likewise means the binding motifs or protein domains necessary for the actual binding to the keratin, the keratin fibers, skin or hair. The binding of the keratin-binding polypeptide (ii) to keratin can be tested under the conditions described in Example 8, 9 and 10. Keratin-binding polypeptides are those polypeptides which, in the abovementioned quantitative keratin-binding tests, have about 10%, 20%, 30%, 40% or 50%, preferably 50%, 60%, 70%, 80% or 90%, particularly preferably 100%, 125%, 150%, very particularly preferably 200%, 300% or 400%, most preferably 500%, 600%, 700% or 1000% or more of the keratin-binding capacity of desmoplakin (SEQ ID No.: 2), preferably of the keratin-binding domain B of desmoplakin (SEQ ID No.: 4).

[0067] “Cosmetically compatible medium” is to be understood in the wide sense and means substances suitable for the production of cosmetic or dermocosmetic preparations, and mixtures thereof. They are preferably protein-compatible media.

[0068] Upon contact with human and/or animal skin tissue or hair, “cosmetically compatible substances” lead to no irritations or damage and have no incompatibilities with other substances. In addition, these substances have a slight allergenic potential and are approved by state registration authorities for use in cosmetic preparations. These substances are familiar to the person skilled in the art and can be found, for example, in cosmetics handbooks, for example Schrader, Grundlagen und Rezepturen der Kosmetika [Fundamentals and formulations of cosmetics], Hüthig Verlag, Heidelberg, 1989, ISBN 3-7785-1491-1.

[0069] “Nucleic acid” or “nucleic acid molecule” means deoxyribonucleotides, ribonucleotides or polymers or hybrids thereof in single-strand or double-strand form, in sense or antisense orientation. The term nucleic acid or nucleic acid molecule can be used to describe a gene, DNA, cDNA, mRNA, oligonucleotide or polynucleotide.

[0070] “Nucleic acid sequence” means a successive and linked together sequence of deoxyribonucleotides or ribonucleotides of a nucleic acid molecule according to the definition given above, as can be ascertained using available DNA/RNA sequencing techniques, and depicted or shown in a list of abbreviations, letters or words which represent nucleotides.

[0071] For the purposes of the present invention, “polypeptide” means a macromolecule constructed from amino acid molecules in which the amino acids are linked together linearly via peptide bonds. A polypeptide can be made up of a few amino acids (about 10 to 100), but also comprises proteins which are generally constructed from at least 100 amino acids, but can also comprise several thousand amino acids. Preferably, polypeptides comprise at least 20, 30, 40 or 50, particularly preferably at least 60, 70, 80 or 90, very particularly preferably at least 100, 125, 150, 175 or 200, most preferably at least more than 200 amino acids, it being possible for the upper limit to be several thousand amino acids.

[0072] “Homology” or “identity” between two nucleic acid sequences is understood as meaning the identity of the nucleic acid sequence over the entire sequence length in question, which is calculated by comparison with the help of the program algorithm GAP (Wisconsin Package Version 10.0, University of Wisconsin, Genetics Computer Group (GCG), Madison, USA; Altschul et al. (1997) Nucleic Acids Res. 25:3389ff) with the following parameter settings:

| | |
|---|---|
| Gap Weight: 50 | Length Weight: 3 |
| Average Match: 10 | Average Mismatch: 0 |

[0073] By way of example, a sequence which has a homology of at least 80% based on nucleic acid with the sequence SEQ ID NO: 1 is understood as meaning a sequence which has a homology of at least 80% when compared with the sequence SEQ ID NO: 1 according to the above program algorithm with the above set of parameters.

[0074] Homology between two polypeptides is understood as meaning the identity of the amino acid sequence over the entire sequence length in question, which is calculated by comparison with the help of the program algorithm GAP (Wisconsin Package Version 10.0, University of Wisconsin, Genetics Computer Group (GCG), Madison, USA) with the following parameter settings:

| | |
|---|---|
| Gap Weight: 8 | Length Weight: 2 |
| Average Match: 2.912 | Average Mismatch: −2.003 |

[0075] By way of example, a sequence which has a homology of at least 80% based on polypeptide with the sequence SEQ ID NO: 2 is understood as meaning a sequence which has a homology of at least 80% when compared with the sequence SEQ ID NO: 2 according to the above program algorithm with the above set of parameters.

[0076] “Hybridization conditions” is to be understood in the wide sense and means stringent or less stringent hybridization conditions depending on the application. Such hybridization conditions are described, inter alia, in Sambrook J, Fritsch E F, Maniatis T et al., in Molecular Cloning (A Laboratory Manual), 2nd edition, Cold Spring Harbor Laboratory Press, 1989, pages 9.31-9.57) or in Current Protocols in Molecular Biology, John Wiley & Sons, N.Y. (1989), 6.3.1-6.3.6. The person skilled in the art would choose hybridization conditions which would allow him to differentiate specific hybridizations from unspecific hybridizations. For example, the conditions during the washing step can be chosen from conditions with low stringency (with approximately 2×SSC at 50° C.) and those with high stringency (with approximately 0.2×SSC at 50° C., preferably at 65° C.) (20×SSC: 0.3 M sodium citrate, 3 M NaCl, pH 7.0). Moreover, the temperature during the washing step can be increased from low stringency conditions at room temperature, approximately 22° C., to higher stringency conditions at approximately 65° C. Both parameters, salt concentration and temperature, can be varied at the same time or else individually, keeping the other parameter in each case constant. During the hybridization, it is also possible to use denaturing agents such as, for example, formamide or SDS. In the presence of 50% formamide, the hybridization is preferably carried out at 42° C. Some illustrative conditions for hybridization and washing step are given below:

1. Hybridization conditions can be chosen, for example, from the following conditions:
[0077] a) 4×SSC at 65° C.,
[0078] b) 6×SSC at 45° C.,
[0079] c) 6×SSC, 100 μg/ml of denatured, fragmented fish sperm DNA at 68° C.,
[0080] d) 6×SSC, 0.5% SDS, 100 μg/ml of denatured salmon sperm DNA at 68° C.,
[0081] e) 6×SSC, 0.5% SDS, 100 μg/ml of denatured, fragmented salmon sperm DNA, 50% formamide at 42° C.,
[0082] f) 50% formamide, 4×SSC at 42° C., or
[0083] g) 50% (vol/vol) formamide, 0.1% bovine serum albumin, 0.1% Ficoll, 0.1% polyvinylpyrrolidone, 50 mM sodium phosphate buffer pH 6.5, 750 mM NaCl, 75 mM sodium citrate at 42° C., or
[0084] h) 2× or 4×SSC at 50° C. (low stringency condition),
[0085] i) 30 to 40% formamide, 2× or 4×SSC at 42° C. (low stringency condition).
   500 mN of sodium phosphate buffer pH 7.2, 7% SDS (g/V), 1 mM EDTA, 10 μg/ml single-stranded DNA, 0.5% BSA (g/V) (Church and Gilbert, Genomic sequencing. Proc. Natl. Acad.Sci. U.S.A. 81:1991. 1984)
   2. Washing steps can be chosen, for example, from the following conditions:
[0086] a) 0.015 M NaCl/0.0015 M sodium citrate/0.1% SDS at 50° C.
[0087] b) 0.1×SSC at 65° C.
[0088] c) 0.1×SSC, 0.5% SDS at 68° C.
[0089] d) 0.1×SSC, 0.5% SDS, 50% formamide at 42° C.
[0090] e) 0.2×SSC, 0.1% SDS at 42° C.
[0091] f) 2×SSC at 65° C. (low stringency condition).

[0092] In one embodiment, the stringent hybridization conditions are chosen as follows:

[0093] A hybridization buffer is chosen which comprises formamide, NaCl and PEG 6000. The presence of formamide in the hybridization buffer destabilizes double-stranded nucleic acid molecules, as a result of which the hybridization temperature can be reduced to 42° C. without lowering the stringency. The use of salt in the hybridization buffer increases the renaturation rate of a duplex, or the hybridization efficiency. Although PEG increases the viscosity of the solution, which has a negative effect on renaturation rates, as a result of the presence of the polymer in the solution, the concentration of the probe in the remaining medium is increased, which increases the hybridization rate. The composition of the buffer is as follows:

TABLE 1
Hybridization buffer
Hybridization buffer

250 mM sodium phosphate buffer pH 7.2
1 mM EDTA
7% SDS (g/v)
250 mM NaCl
10 μg/ml ssDNA
5% polyethylene glycol (PEG) 6000
40% formamide

[0094] The hybridizations are carried out overnight at 42° C. The filters are washed the next morning 3× with 2×SSC+0.1% SDS for about 10 min in each case.

[0095] In connection with the description “hydroxy function-bearing effector molecule”, “hydroxy function” means free OH groups or hydroxyl groups which enable these OH group-bearing molecules to covalently link to other molecules via an esterification reaction. For the purposes of the present invention, “hydroxy functions” are also those which can be converted chemically into OH functions, such as, for example, derivatives such as methoxy, ethoxy. Here, the effector molecules according to the invention have at least one hydroxyl group. However, it is also possible to use effector molecules with two, three or more hydroxy functions.

[0096] In connection with the description, “amino function-bearing effector molecule”, “amino functions” means amino groups which allow said amino function-bearing molecules to covalently link to other molecules via an amide bond. For the purposes of the present invention, “amino functions” are also those which can be converted chemically into amino functions. Here, the effector molecules according to the invention have at least one amino function. However, it is also possible to use effector molecules with two, three or more amino functions and/or secondary amino groups.

[0097] “Coupling” in connection with the binding of a linker molecule to an effector molecule or keratin-binding protein means a covalent linking of said molecules.

[0098] “Coupling functionalities” are functional groups of a linker molecule which can enter into a covalent bond with functional groups of the effector molecule or keratin-binding protein. Nonlimiting examples which may be mentioned are: hydroxy groups, carboxyl groups, thio groups and amino groups. “Coupling functionalities” or “coupling functionality” and “anchor groups” or “anchor group” are used synonymously.

### Self-Assembling Proteins

[0099] Self-assembling proteins are proteins or peptides which can spontaneously congregate under suitable conditions to give higher molecular weight, ordered structures (spheres, films, fibrils, interalia). These may be synthetic, biomimetic or proteins and peptides of natural origin. Nonlimiting examples are structural proteins, β-sheet-rich proteins, and amphiphilic and helical peptides.

[0100] For the purposes of the present invention, “spacer element” means a molecule or macromolecule which physically separates the keratin-binding polypeptide (i) from the effector polypeptide (ii).

[0101] Spacer elements comprise both the linker molecules described below and also proteinogenic elements such as, for example, oligopeptides, polypeptides or protein domains.

[0102] Vectors are DNA molecules which can be stably established in a host cell and duplicated. Vectors are, for example, plasmids, cosmids. In addition, vectors can also be understood as meaning those DNA molecules which can transport DNA elements from one cell into another, without the cells having to necessarily belong to the same organism (e.g., phages, viruses and also agrobacteria). In an advantageous embodiment, the insertion of an expression cassette comprising a gene of interest is realized by means of plasmid vectors. Preference is given to those vectors which can be established extrachromosomally in a cell or an organism. The stable integration of the expression cassette/vector into the host genome is likewise possible.

[0103] The term “expression vector” refers to vectors which comprise a DNA molecule of interest in functional linkage with regulatory elements, and can thus ensure the expression of the DNA molecule of interest in a target organism.

### DETAILED DESCRIPTION OF THE INVENTION

[0104] The present invention provides chimeric keratin-binding effector proteins comprising (a) at least one keratin-binding polypeptide (i) and (b) at least one further effector polypeptide (ii)

[0105] In a particularly preferred embodiment, they are keratin-binding polypeptides (i) which have a binding affinity to human skin keratin, hair keratin or nail keratin.

[0106] Particular preference is given to those keratin-binding polypeptides (i) which
[0107] a) comprise at least one of the sequences according to SEQ ID No.: 2, 4, 6, 8, 10, 12, 14, 16, 18, 20, 22, 24, 26, 28, 30, 32, 34, 36, 38, 40, 42, 44, 46, 48, 50, 52, 54, 56, 58, 60, 62, 64, 66, 68, 70, 72, 74, 76, 78, 80, 82, 84, 86, 88, 90, 92, 94, 96, 98, 100, 102, 104, 106, 108, 110, 112, 114, 116, 118, 120, 122, 124, 126, 128, 130, 132, 134, 136, 138, 140, 146, 150, 153, 156, 157, 158, 160, 162, 164, 166, 213 or 215 or
[0108] b) correspond to a polypeptide which is at least 40%, 45% or 50%, preferably at least 55%, 60%, 65% or 70%, particularly preferably at least 75%, 80%, 85%, 90%, 91%, 92%, 93% or 94%, very particularly preferably at least 95% or 96%, identical to at least one of the sequences according to SEQ ID No.: 2, 4, 6, 8, 10, 12, 14, 16, 18, 20, 22, 24, 26, 28, 30, 32, 34, 36, 38, 40, 42, 44, 46, 48, 50, 52, 54, 56, 58, 60, 62, 64, 66, 68, 70, 72, 74, 76, 78, 80, 82, 84, 86, 88, 90, 92, 94, 96, 98, 100, 102, 104, 106, 108, 110, 112, 114, 116, 118, 120, 122, 124, 126, 128, 130, 132, 134, 136, 138, 140, 146, 150, 153, 156, 157, 158, 160, 162, 164, 166, 213 or 215 and is able to bind keratin.

[0109] In a preferred embodiment of the present invention, the keratin-binding polypeptide (i) used is encoded by a nucleic acid molecule comprising at least one nucleic acid molecule chosen from the group consisting of:
[0110] c) nucleic acid molecule which encodes a polypeptide comprising the sequence shown in SEQ ID No.: 2, 4, 6, 8, 10, 12, 14, 16, 18, 20, 22, 24, 26, 28, 30, 32, 34, 36, 38, 40, 42, 44, 46, 48, 50, 52, 54, 56, 58, 60, 62, 64, 66, 68, 70, 72, 74, 76, 78, 80, 82, 84, 86, 88, 90, 92, 94, 96, 98, 100, 102, 104, 106, 108, 110, 112, 114, 116, 118, 120, 122, 124, 126, 128, 130, 132, 134, 136, 138, 140, 146, 150, 153, 156, 157, 158, 160, 162, 164, 166, 213 or 215;
[0111] d) nucleic acid molecule which comprises at least one polynucleotide of the sequence shown in SEQ ID No.: 1, 3, 5, 7, 9, 11, 13, 15, 17, 19, 21, 23, 25, 27, 29, 31, 33, 35, 37, 39, 41, 43, 45, 47, 49, 51, 53, 55, 57, 59, 61, 63, 65, 67, 69, 71, 73, 75, 77, 79, 81, 83, 85, 87, 89, 91, 93, 95, 97, 99, 101, 103, 105, 107, 109, 111, 113, 115, 117, 119, 121, 123, 125, 127, 129, 131, 133, 135, 137, 139, 145, 149, 152, 159, 161, 163, 165, 212 or 214;
[0112] e) nucleic acid molecule which encodes a polypeptide according to the sequences SEQ ID No.: 2, 4, 6, 8, 10, 12, 14, 16, 18, 20, 22, 24, 26, 28, 30, 32, 34, 36, 38, 40, 42; 44, 46, 48, 50, 52, 54, 56, 58, 60, 62, 64, 66, 68, 70, 72, 74, 76, 78, 80, 82, 84, 86, 88, 90, 92, 94, 96, 98, 100, 102, 104, 106, 108, 110, 112, 114, 116, 118, 120, 122, 124, 126, 128, 130, 132, 134, 136, 138, 140, 146, 150, 153, 156, 157, 158, 160, 162, 164, 166, 213 or 215;
[0113] f) nucleic acid molecule with a nucleic and sequence corresponding to at least one of the sequences according to SEQ ID No.: 1, 3, 5, 7, 9, 11, 13, 15, 17, 19, 21, 23, 25, 27, 29, 31, 33, 35, 37, 39, 41, 43, 45, 47, 49, 51, 53, 55, 57, 59, 61, 63, 65, 67, 69, 71, 73, 75, 77, 79, 81, 83, 85, 87, 89, 91, 93, 95, 97, 99, 101, 103, 105, 107, 109, 111, 113, 115, 117, 119, 121, 123, 125, 127, 129, 131, 133, 135, 137, 139, 145, 149, 152, 159, 161, 163, 165, 212 or 214 or a nucleic acid molecule derived therefrom by substitution, deletion or insertion which encodes a polypeptide which is at least 40%, 45% or 50%, preferably at least 55%, 60%, 65% or 70%, particularly preferably at least 75%, 80%, 85%, 90%, 91%, 92%, 93% or 94%, very particularly preferably at least 95% or 96%, identical to at least one of the sequences according to SEQ ID No.: 2, 4, 6, 8, 10, 12, 14, 16, 18, 20, 22, 24, 26, 28, 30, 32, 34, 36, 38, 40, 42, 44, 46, 48, 50, 52, 54, 56, 58, 60, 62, 64, 66, 68, 70, 72, 74, 76, 78, 80, 82, 84, 86, 88, 90, 92, 94, 96, 98, 100, 102, 104, 106, 108, 110, 112, 114, 116, 118, 120, 122, 124, 126, 128, 130, 132, 134, 136, 138, 140, 146, 150, 153, 156, 157, 158, 160, 162, 164, 166, 213 or 215 and is able to bind to keratin;
[0114] g) nucleic acid molecule which encodes a polypeptide which is recognized by a monoclonal antibody directed toward a polypeptide which is encoded the nucleic acid molecules according to (c) to (e);
[0115] h) nucleic acid molecule coding for a keratin-binding protein which, under stringent conditions, hybridizes with a nucleic acid molecule according to (c) to (e);
[0116] i) nucleic acid molecule coding for a keratin-binding protein which can be isolated from a DNA bank using a nucleic acid molecule according to (c) to (e) or part fragments thereof of at least 15 nt, preferably 20 nt, 30 nt, 50 nt, 100 nt, 200 nt or 500 nt as probe under stringent hybridization conditions; and
[0117] j) nucleic acid molecule which can be produced by backtranslating one of the amino acid sequences shown in the sequences SEQ ID No.: 2, 4, 6, 8, 10, 12, 14, 16, 18, 20, 22, 24, 26, 28, 30, 32, 34, 36, 38, 40, 42, 44, 46, 48, 50, 52, 54, 56, 58, 60, 62, 64, 66, 68, 70, 72, 74, 76, 78, 80, 82, 84, 86, 88, 90, 92, 94, 96, 98, 100, 102, 104, 106, 108, 110, 112, 114, 116, 118, 120, 122, 124, 126, 128, 130, 132, 134, 136, 138, 140, 146, 150, 153, 156, 157, 158, 160, 162, 164, 166, 213 or 215.

[0118] Keratin-binding polypeptide domains suitable according to the invention are present in the polypeptide sequences of desmoplakins, plakophilins, plakoglobins, plectins, periplakins, envoplakins, trichohyalins, epiplakins or hair follicle proteins.

[0119] In a preferred embodiment of the present invention, desmoplakins or part sequences thereof according to the sequences SEQ ID No.: 2, 42, 44, 46, 48, 146, 150, 153, 156, 157, 158, 160, 162, 164 or 166, and/or plakophilins or part sequences thereof according to the sequences SEQ ID No.: 18, 20, 26, 28, 32, 34, 36, 213, 215 and/or plakoglobins or part sequences thereof according to the sequences with the SEQ ID No.: 50, 52, 54, 56, 58, 60, 62, 64, 66, 68, 70, and/or the periplakin according to the sequence with the SEQ ID No.: 86, and/or envoplakins or part sequences thereof according to the sequences with the SEQ ID No.: 90, 92, 94, 96, 98, 102, 104, 105 and/or the sequences according to SEQ ID No.: 138 and 140 are used as keratin-binding polypeptides. Preferred keratin-binding domains are the desmoplakin polypeptides shown in the sequences SEQ ID NOs: 4, 6, 8, 10, 12, 14, 146, 150, 153, 156, 157, 158, 160, 162, 164, 166, 213 or 215, and functional equivalents thereof. In a very particularly preferred embodiment of the present invention, the keratin-binding polypeptides shown in the sequences SEQ ID No.: 156, 157, 158, 160, 162, 164, 166, 213 and/or 215 are used in the method according to the invention. In an embodiment of the present invention which is preferred most of all, the keratin-binding protein shown in the sequence SEQ ID No.: 213 is used. It goes without saying that this protein can be used either with or without the histidine anchor present in the SEQ ID No.: 213. Thus, the histidine anchor (or a purification/detection system to be used analogously) can also be present C-terminally. In practical use of said keratin-binding proteins (e.g. in cosmetic preparations), a histidine anchor (or a purification/detection system to be used analogously) is not necessary. The use of said proteins without additional amino acid sequences is thus preferred.

[0120] Likewise included according to the invention are “functional equivalents” of the specifically disclosed keratin-binding polypeptides (i) and the use of these in the method according to the invention.

[0121] Within the scope of the present invention, “functional equivalents” or analogs of these specifically disclosed keratin-binding polypeptides (i) are polypeptides different therefrom which also have the desired biological activity, such as, for example, keratin binding. Thus, for example, “functional equivalents” of keratin-binding polypeptides are understood as meaning those polypeptides which, under otherwise comparable conditions, in the quantitative keratin-binding tests described in the examples, have about 10%, 20%, 30%, 40% or 50%, preferably 60%, 70%, 80% or 90%, particularly preferably 100%, 125%, 150%, very particularly preferably 200%, 300% or 400%, most preferably 500%, 600%, 700% or 1000% or more of the keratin-binding capacity of the polypeptides shown under the SEQ ID No.: 2, 4, 6, 8, 10, 12, 14, 16, 18, 20, 22, 24, 26, 28, 30, 32, 34, 36, 38, 40, 42, 44, 46, 48, 50, 52, 54, 56, 58, 60, 62, 64, 66, 68, 70, 72, 74, 76, 78, 80, 82, 84, 86, 88, 90, 92, 94, 96, 98, 100, 102, 104, 106, 108, 110, 112, 114, 116, 118, 120, 122, 124, 126, 128, 130, 132, 134, 136, 138, 140, 146, 150, 153, 156, 157, 158, 160, 162, 164, 166, 213 or 215.

[0122] According to the invention, “functional equivalents” are understood in particular as meaning also muteins which have an amino acid other than that specifically given in at least one sequence position of the abovementioned amino acid sequences but nevertheless have one of the abovementioned biological activities. “Functional equivalents” thus include the muteins obtainable by a mutation where the specified changes can arise in any sequence position provided they lead to a mutein with the profile of properties according to the invention.

[0123] For the purposes of the present invention, “mutation” means the change in the nucleic acid sequence of a gene variant in a plasmid or in the genome of an organism. Mutations can arise, for example, as a result of errors during replication, or be caused by mutagenis. The rate of spontaneous mutations in the cell genome of organisms is very low although a large number of biological, chemical or physical mutagens is known to the knowledgeable person skilled in the art.

[0124] Mutations include substitutions, insertions, deletions of one or more nucleic acid radicals. Substitutions are understood as meaning the replacement of individual nucleic acid bases, a distinction being made here between transitions (substitution of a purine base for a purine base or a pyrimidine base for a pyrimidine base) and transversions (substitution of a purine base for a pyrimidine base (or vice versa)).

[0125] Additions or insertions are understood as meaning the incorporation of additional nucleic acid radicals into the DNA, possibly resulting in shifts in the reading frame. With reading frame shifts of this type, a distinction is made between “in frame” insertions/additions and “out of frame” insertions. In the case of “in frame” insertions/additions, the reading frame is retained and a polypeptide enlarged by the number of amino acids encoded by the inserted nucleic acids arises. In the case of “out of frame” insertions/additions, the original reading frame is lost and the formation of a complete and functioning polypeptide is no longer possible.

[0126] Deletions describe the loss of one or more base pairs, which likewise lead to “in frame” or “out of frame” shifts in the reading frame and the consequences associated therewith regard to the formation of an intact protein.

[0127] The mutagenic agents (mutagens) which can be used for producing random or targeted mutations and the applicable methods and techniques are known to the person skilled in the art. Such methods and mutagens are described, for example, in A. M. van Harten [(1998), “Mutation breeding, theory and practical applications”, Cambridge University Press, Cambridge, UK], E Friedberg, G Walker, W Siede [(1995), “DNA Repair and Mutagenesis”, Blackwell Publishing], or K. Sankaranarayanan, J. M. Gentile, L. R. Ferguson [(2000) “Protocols in Mutagenesis”, Elsevier Health Sciences].

[0128] For introducing targeted mutations, customary molecular biological methods and processes such as, for example, the in vitro mutagenesis Kits, LA PCR in vitro Mutagenesis Kit (Takara Shuzo, Kyoto) or the QuikChange® Kit from Stratagene or PCR mutageneses using suitable primers can be used.

[0129] As already discussed above, there is a large number of chemical, physical and biological mutagens.

[0130] The mutagens listed below are given by way of example, but are nonlimiting.

[0131] Chemical mutagens can be subdivided according to their mechanism of action. Thus, there are base analogs (e.g. 5-bromouracil, 2-aminopurine), mono- and bifunctional alkylating agents (e.g. monofunctional ones such as ethylmethylsulfonate, dimethyl sulfate, or bifunctional ones such as dichloroethyl sulfite, mitomycin, nitrosoguanidines-dialkylnitrosamines, N-nitrosoguanidine derivatives) or intercalating substances (e.g. acridines, ethidium bromide).

[0132] Thus, for example, for the method according to the invention, it is also possible to use those polypeptides which are obtained as a result of a mutation of a polypeptide according to the invention e.g. according to SEQ ID No.: 2, 4, 6, 8, 10, 12, 14, 16, 18, 20, 22, 24, 26, 28, 30, 32, 34, 36, 38, 40, 42, 44, 46, 48, 50, 52, 54, 56, 58, 60, 62, 64, 66, 68, 70, 72, 74, 76, 78, 80, 82, 84, 86, 88, 90, 92, 94, 96, 98, 100, 102, 104, 106, 108, 110, 112, 114, 116, 118, 120, 122, 124, 126, 128, 130, 132, 134, 136, 138, 140, 146, 150, 153, 156, 157, 158, 160, 162, 164, 166, 213 and/or 215.

[0133] Examples of suitable amino acid substitutions are given in the table below:

TABLE 2
Suitable amino acid substitutions

| Original radical | Examples of substitution |
|---|---|
| Ala | Ser |
| Arg | Lys |
| Asn | Gln; His |
| Asp | Glu |
| Cys | Ser or Ala |
| Gln | Asn |
| Glu | Asp |
| Gly | Pro |
| His | Asn; Gln |
| Ile | Leu; Val |
| Leu | Ile; Val |
| Lys | Arg; Gln; Glu |
| Met | Leu; Ile |
| Phe | Met; Leu; Tyr |
| Ser | Thr |
| Thr | Ser |
| Trp | Tyr |
| Tyr | Trp; Phe |
| Val | Ile; Leu |

[0134] It is known that in SEQ ID NO: 2, the serine naturally present at position 2849 can, for example, be replaced by glycine in order to avoid a phosphorylation at this position (Fontao L, Favre B, Riou S, Geerts D, Jaunin F, Saurat J H, Green K J, Sonnenberg A, Borradori L., Interaction of the bullous pemphigoid antigen 1 (BP230) and desmoplakin with intermediate filaments is mediated by distinct sequences within their COOH terminus, Mol Biol Cell. 2003 May; 14(5):1978-92. Epub 2003 Jan 26).

[0135] In the above sense, “functional equivalents” are also “precursors” of the described polypeptides, and “functional derivatives” and “salts” of the polypeptides.

[0136] Here, “precursors” are natural or synthetic precursors of the polypeptides with or without desired biological activity.

[0137] The expression “salts” is understood as meaning either salts of carboxyl groups or acid addition salts of amino groups with the protein molecules according to the invention. Salts of carboxyl groups can be prepared in a manner known per se and include inorganic salts, such as, for example, sodium, calcium, ammonium, iron and zinc salts, and also salts with organic bases, such as, for example, amines such as triethylamine, arginine, lysine, piperidine and the like. Acid addition salts, such as, for example, salts with mineral acids, such as hydrochloric acid or sulfuric acid, and salts with organic acids, such as acetic acid and oxalic acid, are likewise provided by the invention.

[0138] “Functional equivalents” naturally also include polypeptides which are accessible from other organisms, and naturally occurring variants (alleles). For example, through sequence comparisons, areas of homologous sequence regions or preserved regions can be determined. Using these sequences, DNA databases (e.g. genomic or cDNA databases) can be inspected for equivalent enzymes using bioinformatic comparison programs. Suitable computer programs and databases which are accessible to the public are sufficiently known to the person skilled in the art.

[0139] These alignments of known protein sequences can be carried out, for example, using a computer program such as Vector NTI 8 (version from Sep. 25, 2002) from InforMax Inc.

[0140] Furthermore, “functional equivalents” are fusion proteins which have one of the above-mentioned polypeptide sequences or functional equivalents derived therefrom and have at least one further heterologous sequence functionally different therefrom in functional N- or C-terminal linkage (i.e. without mutual essential functional impairment of the fusion protein parts). Nonlimiting examples of such heterologous sequences are, for example, signal peptides or enzymes.

[0141] “Functional equivalents” included according to the invention are homologs to the specifically disclosed proteins. These have at least 40%, 45% or 50%, preferably at least 55%, 60%, 65% or 70%, particularly preferably at least 75%, 80%, 85%, 90%, 91%, 92%, 93% or 94%, very particularly preferably at least 95% or 96% homology to one of the specifically disclosed amino acid sequences, calculated using the computer programs and computer algorithms disclosed in the definitions.

[0142] In the case of a possible protein glycosylation, “functional equivalents” according to the invention include proteins of the type referred to above in deglycosylated or glycosylated form, and also modified forms obtainable by changing the glycosylation pattern.

[0143] In the case of a possible protein phosphorylation, “functional equivalents” according to the invention include proteins of the type referred to above in dephosphorylated or phosphorylated form, and also modified forms obtainable by changing the phosphorylation pattern.

[0144] Homologs of the polypeptides according to the invention can be identified by screening combinatorial banks of mutants, such as, for example, shortening mutants. For example, a bank of protein variants can be produced by combinatorial mutagenesis at a nucleic acid level, such as, for example, by enzymatic ligation of a mixture of synthetic oligonucleotides. There is a large number of methods which can be used for producing banks of potential homologs from a degenerated oligonucleotide sequence. The chemical synthesis of a degenerated gene sequence can be carried out in an automatic DNA synthesis machine, and the synthetic gene can then be ligated into a suitable expression vector. The use of a degenerated set of genes makes it possible to provide all of the sequences in one mixture which encode the desired set of potential protein sequences. Methods for synthesizing degenerated oligonucleotides are known to the person skilled in the art (e.g. Narang, S. A. (1983) Tetrahedron 39:3; itakura et al. (1984) Annu. Rev. Biochem. 53:323; Itakura et al., (1984) Science 198:1056; Ike et al. (1983) Nucleic Acids Res. 11:477).

[0145] In the prior art, a number of techniques for the screening of gene products of combinatorial banks which have been produced by point mutations or shortening, and for the screening of cDNA banks for gene products with a selected property are known. The most often used techniques for screening large gene banks which are subjected to analysis with a high throughput include the cloning of the gene bank in replicable expression vectors, transforming the suitable cells with the resulting vector bank and expressing the combinatorial genes under conditions under which the detection of the desired activity facilitates the isolation of the vector which encodes the gene whose product has been detected. Recursive ensemble mutagenesis (REM), a technique which increases the frequency of functional mutants in the banks can be used in combination with the screening tests in order to identify homologs (Arkin and Yourvan (1992) PNAS 89:7811-7815; Delgrave et al. (1993) Protein Engineering 6(3):327-331).

[0146] The inspection of physically available cDNA or genomic DNA libraries of other organisms using the nucleic acid sequence described under SEQ ID No.: 1, 3, 5, 7, 9, 11, 13, 15, 17, 19, 21, 23, 25, 27, 29, 31, 33, 35, 37, 39, 41, 43, 45, 47, 49, 51, 53, 55, 57, 59, 61, 63, 65, 67, 69, 71, 73, 75, 77, 79, 81, 83, 85, 87, 89, 91, 93, 95, 97, 99, 101, 103, 105, 107, 109, 111, 113, 115, 117, 119, 121, 123, 125, 127, 129, 131, 133, 135, 137, 139, 145, 149, 152, 159, 161, 163, 165, 212 and/or 214, particularly preferably 165, 212 and 214, most preferably 214, or parts thereof as probe is a method known to the person skilled in the art for identifying homologs in other ways. Here, the probes derived from the nucleic acid sequence according to SEQ ID No.: 1, 3, 5, 7, 9, 11, 13, 15, 17, 19, 21, 23, 25, 27, 29, 31, 33, 35, 37, 39, 41, 43, 45, 47, 49, 51, 53, 55, 57, 59, 61, 63, 65, 67, 69, 71, 73, 75, 77, 79, 81, 83, 85, 87, 89, 91, 93, 95, 97, 99, 101, 103, 105, 107, 109, 111, 113, 115, 117, 119, 121, 123, 125, 127, 129, 131, 133, 135, 137, 139, 145, 149, 152, 159, 161, 163, 165, 212 and/or 214, particularly preferably 165, 212 and 214, most preferably 214, have a length of at least 20 bp, preferably at least 50 bp, particularly preferably at least 100 bp, very particularly preferably at least 200 bp, most preferably at least 400 bp. The probe can also be one or more kilobases long, e.g. 1 Kb, 1.5 Kb or 3 Kb. For inspecting the libraries it may also be possible to use a sequence of complementary DNA strand described under SEQ ID No.: 1, 3, 5, 7, 9, 11, 13, 15, 17, 19, 21, 23, 25, 27, 29, 31, 33, 35, 37, 39, 41, 43, 45, 47, 49, 51, 53, 55, 57, 59, 61, 63, 65, 67, 69, 71, 73, 75, 77, 79, 81, 83, 85, 87, 89, 91, 93, 95, 97, 99, 101, 103, 105, 107, 109, 111, 113, 115, 117, 119, 121, 123, 125, 127, 129, 131, 133, 135, 137, 139, 145, 149, 152, 159, 161, 163, 165, 212 and/or 214, particularly preferably 165, 212 and 214, most preferably 214, or a fragment thereof with a length between 20 bp and several kilobases. The hybridization conditions to be used are described above.

[0147] In the method according to the invention, it is also possible to use those DNA molecules which, under standard conditions, hybridize with the nucleic acid molecules described by SEQ ID No.: 1, 3, 5, 7, 9, 11, 13, 15, 17, 19, 21, 23, 25, 27, 29, 31, 33, 35, 37, 39, 41, 43, 45, 47, 49, 51, 53, 55, 57, 59, 61, 63, 65, 67, 69, 71, 73, 75, 77, 79, 81, 83, 85, 87, 89, 91, 93, 95, 97, 99, 101, 103, 105, 107, 109, 111, 113, 115, 117, 119, 121, 123, 125, 127, 129, 131, 133, 135, 137, 139, 145, 149, 152, 159, 161, 163, 165, 212 and/or 214, particularly preferably 165, 212 and 214, most preferably 214, and encoding keratin-binding polypeptides, nucleic acid molecules complementary to these or parts of the abovementioned, and as complete sequences encode polypeptides which have the same properties as the polypeptides described under SEQ ID No.: 2, 4, 6, 8, 10, 12, 14, 16, 18, 20, 22, 24, 26, 28, 30, 32, 34, 36, 38, 40, 42, 44, 46, 48, 50, 52, 54, 56, 58, 60, 62, 64, 66, 68, 70, 72, 74, 76, 78, 80, 82, 84, 86, 88, 90, 92, 94, 96, 98, 100, 102, 104, 106, 108, 110, 112, 114, 116, 118, 120, 122, 124, 126, 128, 130, 132, 134, 136, 138, 140, 146, 150, 153, 156, 157, 158, 160, 162, 164, 166, 213 or 215.

[0148] A particularly advantageous embodiment of the invention are keratin-binding polypeptides (i) which comprise at least one of the polypeptide sequences as shown in SEQ ID No.: 2, 4, 6, 8, 10, 12, 14, 16, 18, 20, 22, 24, 26, 28, 30, 32, 34, 36, 38, 40, 42, 44, 46, 48, 50, 52, 54, 56, 58, 60, 62, 64, 66, 68, 70, 72, 74, 76, 78, 80, 82, 84, 86, 88, 90, 92, 94, 96, 98, 100, 102, 104, 106, 108, 110, 112, 114, 116, 118, 120, 122, 124, 126, 128, 130, 132, 134, 136, 138, 140, 146, 150, 153, 156, 157, 158, 160, 162, 164, 166, 213 or 215, with the proviso that the keratin binding of said polypeptides is at least 10%, 20%, 30%, 40% or 50%, preferably 60%, 70%, 80% or 90%, particularly preferably 100%, of the value which the corresponding polypeptide sequences as shown in SEQ ID No.: 2, 4, 6, 8, 10, 12, 14, 16, 18, 20, 22, 24, 26, 28, 30, 32, 34, 36, 38, 40, 42, 44, 46, 48, 50, 52, 54, 56, 58, 60, 62, 64, 66, 68, 70, 72, 74, 76, 78, 80, 82, 84, 86, 88, 90, 92, 94, 96, 98, 100, 102, 104, 106, 108, 110, 112, 114, 116, 118, 120, 122, 124, 126, 128, 130, 132, 134, 136, 138, 140, 146, 150, 153, 156, 157, 158, 160, 162, 164, 166, 213 or 215 have, measured in the test according to Example 9 or 10.

[0149] Preference is given to using keratin-binding polypeptides (i) which have a highly specific affinity for the desired organism. Accordingly, for uses in skin cosmetics, preference is given to using keratin-binding polypeptides (i) which have a particularly high affinity to human skin keratin. For uses in hair cosmetics, preference is given to those polypeptide sequences which have a particularly high affinity to human hair keratin.

[0150] For applications in the pet field, besides the described polypeptide sequences (SEQ ID No.: 2, 4, 6, 8, 10, 12, 14, 16, 18, 20, 22, 24, 26, 28, 30, 32, 34, 36, 38, 40, 42, 44, 46, 48, 50, 52, 54, 56, 58, 60, 62, 64, 66, 68, 70, 72, 74, 76, 78, 80, 82, 84, 86, 88, 90, 92, 94, 96, 98, 100, 102, 104, 106, 108, 110, 112, 114, 116, 118, 120, 122, 124, 126, 128, 130, 132, 134, 136, 138, 140, 146, 150, 153, 156, 157, 158, 160, 162, 164, 166, 213 or 215, preferably in SEQ ID NO: 2, 4, 6, 8, 10, 12, 14, 40, 42, 44, 46, 48, 146, 150, 153, 156, 157, 158, 160, 164, 166, 213 or 215, particularly preferably 166 and 213, most preferably 213), those keratin-binding polypeptides (i) are accordingly preferred which have a particularly high affinity to the corresponding keratin, for example canine keratin or feline keratin.

[0151] However, it is also possible to use more than one keratin-binding polypeptide (i) coupled to the effector molecule (i) according to the invention, for example a keratin-binding polypeptide (i) which has a high binding affinity to human skin keratin can be combined with an effect molecule in combination with another keratin-binding polypeptide (i) which has a high affinity to human hair keratin. It is also possible to use chimeric polypeptides which comprise two or more copies of the same (and also different) keratin-binding polypeptides (i) or keratin-binding domains thereof. For example, it was thus possible to achieve particularly effective keratin binding.

[0152] Suitable keratin-binding polypeptides (i) are known. For example, desmoplakins and plectins comprise keratin-binding domains (Fontao L, Favre B, Riou S, Geerts D, Jaunin F, Saurat J H, Green K J, Sonnenberg A, Borradori L., Interaction of the bullous pemphigoid antigen 1 (BP230) and desmoplakin with intermediate filaments is mediated by distinct sequences within their COOH terminus., Mol Biol Cell. 2003 May; 14(5):1978-92. Epub 2003 Jan 26; Hopkinson S B, Jones J C., The N-terminus of the transmembrane protein BP180 interacts with the N-terminal domain of BP230, thereby mediating keratin cytoskeleton anchorage to the cell surface at the site of the hemidesmosome, Mol Biol Cell. 2000 January; 11(1):277-86).

[0153] The keratin-binding polypeptides (i) according to the invention can also—if desired—be separated again easily from the keratin. For this, for example, a rinse containing keratin can be used, as a result of which the keratin-binding polypeptides (i) are displaced from their existing binding to the keratin and are saturated with the keratin from the rinse. Alternatively, a rinse with a high content of detergent (e.g. SDS) is also possible for the washing off.

[0154] The present invention also preferably provides the above-described keratin-binding effector proteins where the effector polypeptide (ii) is chosen from the group consisting of enzymes, antibodies, effector-binding proteins, fluorescent proteins, antimicrobial peptides and self-assembling proteins.

### Enzymes:

[0155] The enzymes to be mentioned are preferably those chosen from the group consisting of oxidases, peroxidases, proteases, tyrosinases, lactoperoxidase, lysozyme, amyloglycosidases, glucose oxidases, superoxide dismutases, photolyases and catalases.

### Antibodies

[0156] The antibodies to be mentioned are preferably those which can bring a positive cosmetic benefit with them, e.g. antibodies directed toward skin pathogens.

[0157] The effector-binding proteins to be mentioned are preferably carotenoid-binding proteins (also called CBP below), vitamin-binding, chromophore-binding, odorant-binding, sugar-binding and metal-binding proteins. Among the carotenoid-binding proteins, particular preference is given to the carotenoid-binding protein (Accession number SWISS-PROT: Q8MYA9) from the silkworm Bombyx mori. The isolation of the protein and the characterization of the carotenoid-binding properties of this protein is described in Tabunoki et al. (2002; Isolation, characterization, and cDNA sequence of a carotenoid binding protein from the silk gland of Bombyx mori larvae.; J Biol Chem 277: 32133-32140). Among the metal-binding proteins, particular preference is given to the “Lead, cadmium, zinc and mercury transporting ATPase” ZntA (SWISS-PROT: P37617) from E. coli. The isolation and characterization of the ZntA protein are described, inner alia, in Sofia et al. (1994; Analysis of the Escherichia coli genome. V. DNA sequence of the region from 76.0 to 81.5 minutes.; Nucleic Acids Res 22: 2576-2586), Rensing et al. (1997; The znta gene of Escherichia coli encodes a Zn(II)-translocating P-type ATPase.; Proc Natl Acad Sci 94; 14326-14331) and Sharma et al. (2000; The ATP hydrolytic activity of purified ZntA, a Pb(II)/Cd(II)/Zn(II)-translocating ATPase from Escherichia coli.; J Biol Chem 275: 3873-3878).

### Fluorescent Proteins:

[0158] The fluorescent proteins to be mentioned are preferably those chosen from the group consisting of Green Fluorescent Protein (GFP), enhanced Green Fluorescent Protein (eGFP), Red Fluorescent Protein (RFP), monomeric Red Fluorescent Protein (mRFP), dsRED, Blue Fluorescent Protein (BFP), Yellow Fluorescent Protein (YFP) and Cyan Fluorescent Protein (CFP). Particular preference is given to the enhanced Green Fluorescent Protein (eGFP).

[0159] The GFP proteins are proteins which are produced by some animals which can fluoresce green if they are irradiated with blue light (UV light). One example of a carrier of the GFP protein is the jellyfish Aequorea victoria. Large numbers of this jellyfish with a characteristic green emission are found in the summer months on the north Pacific coast of the USA and Canada. The preceding letter “e” describes an improved “enhanced” version of the wild type GFP. eGFP is characterized by a 35 times higher intensity of the fluorescence.

[0160] Such fluorescent proteins are described and sold, for example, by the HHMI (Howard Hughes Medical Institute) laboratory.

[0161] The use of keratin-binding effector proteins comprising fluorescent proteins serves to achieve a more healthy and luminous-looking skin shade or for the optical lightening of the skin (“skin whitening”) following application to the skin.

[0162] In addition, these fluorescent protein-comprising keratin-binding effector proteins can also be used for lightening hair or for producing special reflections or shimmers on the hair. In addition, the fluorescent protein-comprising keratin-binding effector proteins can be used in decorative cosmetics in order, for example, to produce the effect of a tattoo when irradiated with UV light.

### AMPs

[0163] The antimicrobial peptides to be mentioned are preferably those chosen from the group consisting of polypeptides which lead to the inhibition of the growth of microorganisms, such as bacteria, fungi or protozoa. Particular preference is given to the polypeptide according to SEQ ID No.: 211.

### Self-Assembling Proteins:

[0164] The self-assembling proteins to be mentioned are preferably silk proteins from various organisms, such as, for example, spiders (e.g. Araneus diadematus), silkworms (e.g. Bombyx mori), mussels (e.g. Mytilus edulis). Among the silk proteins, particular preference is given to the C16 spider silk protein, which represents a 16-fold repetition of the C modulus of the protein ADF4 from Araneus diadematus. The construction and characterization of the C16 spider silk protein is described in Huemmerich et al. (2004; Primary structure elements of spider dragline silks and their contribution to protein solubility; Biochemistry 43: 13604-13612). Particular preference is given to the following silk proteins:

[0165] Silk protein from Nephila clavipes accession number AY855102 and U37520, Araneus gemmoides accession number AY855101 and accession number AY855100, Argiope aurantia accession number AY855099 and AY855098, the synthetic spider silk protein accession number DQ001900 and accession number DQ186903.

[0166] Further highly suitable effector proteins (ii) are polypeptides which occur naturally in microorganisms, in particular in E. coli or Bacillus subtilis. Examples of such fusion partners are the sequences YaaD (Accession No. BG10075) (SEQ ID NO:197 and 198) and thioredoxin (Accession No. EG11031) (SEQ ID NO:185 and 186).

[0167] Fragments and functional equivalents (according to the definition given above) of the abovementioned proteins and polypeptides are also suitable in principle as effector proteins (ii).

[0168] A particularly preferred subject matter of the present invention is directed to keratin-binding effector proteins comprising, as effector polypeptide (ii), a silk protein, particularly preferably silk proteins which comprise at least one of the sequences according to SEQ ID No.: 151, 201, 202, 203, 204, 205, 206, 207, 208, 209 or 210, or correspond to a polypeptide which is at least 40%, 45% or 50%, preferably at least 55%, 60%, 65% or 70%, particularly preferably at least 75%, 80%, 85%, 90%, 91%, 92%, 93% or 94%, very particularly preferably at least 95% or 96% identical to at least one of the sequences according to SEQ ID No.: 151, 201, 202, 203, 204, 205, 206, 207, 208, 209 or 210.

[0169] In addition, the invention provides those keratin-binding effector proteins comprising silk proteins which are encoded by a nucleic acid molecule comprising at least one nucleic acid molecule chosen from the group consisting of:
[0170] k) nucleic acid molecule which encodes a polypeptide comprising the sequence shown in SEQ ID No.: 151, 201, 202, 203, 204, 205, 206, 207, 208, 209 or 210;
[0171] l) nucleic acid molecule which comprises at least one polynucleotide of the sequence shown in SEQ ID No.: 150;
[0172] m) nucleic acid molecule which encodes a polypeptide according to the sequences SEQ ID No.: 151, 201, 202, 203, 204, 205, 206, 207, 208, 209 or 210;
[0173] n) nucleic acid molecule with a nucleic acid sequence according to SEQ ID No.: 150 or a nucleic acid molecule derived therefrom by substitution, deletion or insertion which encodes a polypeptide which is at least 40% identical to the sequence according to SEQ ID No.: 151;
[0174] o) nucleic acid molecule which encodes a polypeptide which is recognized by a monoclonal antibody directed toward a polypeptide which is encoded by the nucleic acid molecules according to (k) to (m);
[0175] p) nucleic acid molecule coding for a keratin-binding protein which hybridizes under stringent conditions with a nucleic acid molecule according to (k) to (m);
[0176] q) nucleic acid molecule coding for a keratin-binding protein which can be isolated from a DNA bank using a nucleic acid molecule according to (k) to (m) or part fragments thereof comprising at least 15 nucleotides as probe under stringent hybridization conditions; and
[0177] r) nucleic acid molecule which can be produced by backtranslating one of the amino acid sequences shown in the sequences SEQ ID No.: 151, 201, 202, 203, 204, 205, 206, 207, 208, 209 or 210.

[0178] In a preferred embodiment of the present invention, the chimeric keratin-binding effector proteins according to the invention are proteins in which the above-described polypeptides (i) and (ii) are linked together by means of translation fusion.

[0179] Besides the abovementioned effector proteins (ii), in one form of the present invention it is also possible to use those polypeptides which are constructed from at least 3 to 10, preferably at least 11 to 50, particularly preferably at least 51 to 100 and especially preferably at least more than 100 amino acids (also called fusion partners below) and which are not naturally linked to a keratin-binding polypeptide (i) as described above.

[0180] The effector protein (ii) can be chosen from a large number of proteins or polypeptides. It is also possible for a plurality of effector proteins (ii) to be linked to a keratin-binding polypeptide (i), for example on the amino terminus and on the carboxy terminus of the keratin-binding polypeptide moiety.

[0181] The keratin-binding effector proteins specified according to the invention and the keratin-binding polypeptides (i) and the effector proteins (ii) present therein can be produced chemically by known methods of peptide synthesis, for example by solid-phase synthesis according to Merrifield (2005, Kimmerlin T, Seebach D., ‘100 years of peptide synthesis’: ligation methods for peptide and protein synthesis with applications to beta-peptide assemblies., J Pept Res. 2005 February; 65(2):229-260).

[0182] Of particular suitability, however, are genetic engineering methods in which the nucleic acid molecules coding for the keratin-binding polypeptides (i) and the nucleic acid molecules coding for the effector proteins (ii) are functionally linked with one another so that, as a result of the translation of the fused nucleic acid molecule, a single general translation product is formed (translation fusion).

[0183] Host organisms (production organisms) suitable for producing the above-described keratin-binding polypeptides (i), the effector proteins (ii) or the fusion proteins (comprising the amino acid sequences of the polypeptides (i) and (ii)) are prokaryotes (including the Archaea) and eukaryotes, preferably bacteria including halobacteria and methanococci, fungi, insect cells, plant cells and mammal cells, particularly preferably Escherichia coli, Bacillus subtilis, Bacillus. megaterium, Aspergillus oryzea, Aspergillus nidulans, Aspergillus niger, Pichia pastoris, Pseudomonas spec., Lactobacillae, Hansenula polymorpha, Trichoderma reesei, and SF9 (or related cells).

### Chemical Coupling

[0184] The invention further preferably provides keratin-binding effector proteins in which the above-described polypeptides (i) and (ii) are linked together by means of a chemical coupling reaction. During these coupling reactions, bonds can be closed chosen from the group of covalent bonds consisting of thioesters, esters, thioethers, ethers, amide bonds, sulfonic esters and sulfonamide bonds. Here, said linkages can be closed between the side chains of internal amino acids, the N-terminus or the C-terminus of the keratin-binding polypeptide (i) and the side chains of internal amino acids, the N-terminus or the C-terminus of the effector protein.

[0185] Alternatively, a direct coupling between effector molecule (ii) and the keratin-binding domain can be carried out e.g. by means of carbodiimides, glutardialdehyde or other crosslinkers known to the person skilled in the art. A selection. of such coupling reactions is given in 2005, Kimmerlin T, Seebach D., ‘100 years of peptide synthesis’. ligation methods for peptide and protein synthesis with applications to beta-peptide assemblies., J Pept Res., 65(2):229-260, and 2004, David R et al., Expressed protein ligation, Eur. J. Biochem. 271, 663-677.

[0186] Also provided by the present invention are keratin-binding effector proteins in which the effector polypeptide (ii) and the keratin-binding polypeptide (i) are joined together by means of a spacer element. The spacer element may be stable, thermally cleavable, photocleavable or enzymatically cleavable (particularly by lipases, esterases, proteases, phosphatases, hydrolases etc.). Corresponding chemical structures are known to the person skilled in the art and are integrated between the molecular moieties (i) and (ii). Examples of enzymatically cleavable linkers which can be used in the molecules according to the invention are given, for example, in WO 98/01406, to the entire contents of which reference is hereby expressly made.

[0187] The spacer elements may be crosslinkers which are known in principle to the person skilled in the art, preferably carbodiimides or glutardialdehyde. For this linkage, a virtually direct linkage between the keratin-binding polypeptide and the effector protein is ensured. Carbodiimides to be mentioned are preferably dicyclohexylcarbodiimide (DCC), diisopropylcarbodiimide (DIC), N′-(3-dimethylaminopropyl)-N-ethylcarbodiimide hydrochloride (EDC), with the use of diisopropylcarbodiimide or EDC being particularly preferred.

[0188] A further preferred subject matter of the invention is keratin-binding effector proteins in which the spacer element linking the polypeptides (i) and (ii) is a polypeptide.

[0189] For example, the nucleic acid molecules coding for the keratin-binding effector proteins can be modified by suitable biotechnological cloning methods in such a way that the translation fusion also comprises a polypeptide sequence functioning as spacer element. These polypeptide spacer elements can have cleavage sites for proteases (e.g. skin protease cathepsin D), lipases, esterases, phosphatases or hydrolases, or polypeptide sequences which permit simple purification of the fusion protein, for example so-called His tags, i.e. oligohistidine radicals.

[0190] In addition, it is also possible to insert additional amino acids at the linkage sites between the polypeptides (i) and (ii) by means of suitable genetic engineering methods. This may, for example, also arise from recognition sites for restriction endonucleases being either newly created or inactivated at the nucleic acid level. Furthermore, additional amino acids can be inserted at the linkage sites of two fusion partners in order to create a linker sequence so that the two fusion partners can be folded independently of one another to give functional polypeptide moieties. The proteins according to the invention can also be modified posttranslationally, i.e. after their translation, for example by glycosylation, phosphorylation or acylation. Such a modification can also take place by a chemical route, e.g. crosslinking with glutardialdehyde.

[0191] In a particularly preferred embodiment, the present invention provides keratin-binding effector proteins which are indirectly joined together by means of a spacer element, where the spacer element is an at least bifunctional linker which covalently joins together the keratin-binding polypeptide (i) and the effector polypeptide by binding to side chains of internal amino acids, the C-terminus or the N-terminus of said polypeptides.

[0192] A keratin-binding effector protein according to the invention can be produced by coupling an effector protein (ii) onto a keratin-binding polypeptide (i) using a linker molecule (iii) which has at least two coupling functionalities which can enter into bonds chosen from the group consisting of thioester, ester, thioether, ether, amide, sulfonic ester and sulfonamide bonds, and
[0193] (a) in a first coupling step, firstly the effector polypeptide (ii) is bonded to the linker molecule (iii) via one of said bonds, and
[0194] (b) in a further coupling step, the reaction product from (a) is coupled to the keratin-binding polypeptide (i) via a coupling functionality of the linker molecule (iii) which is still free.

[0195] In a preferred embodiment, the coupling functionalities are at least two different functional groups.

[0196] The binding of the linker molecule to the effector polypeptide (ii) takes place via a chemical coupling reaction. This can take place, for example, via the C- or N-terminal functionality or the side chains of the effector polypeptide, in particular via amino functions, hydroxy functions, carboxylate functions or thiol functions. Preference is given to a linkage via the amino functions of one or more lysine radicals, one or more thiol groups of cysteine radicals, one or more hydroxyl groups of serine, threonine or tyrosine radicals, one or more carboxyl groups of aspartic acid or glutamic acid radicals or via the N-terminal or C-terminal function of the effector polypeptide (ii).

[0197] Such chemical coupling reactions are known to the person skilled in the art and are described, for example, in: Becker, H. G. O., Organikum [Organics], 20th edition, 1996, Johann Ambrosius Barth Verlag Heidelberg or Hermanson, G. T.: Bioconjugate Techniques, 1996, Academic Press, San Diego.

[0198] Apart from the amino acid functions occurring in the primary sequence of the effector polypeptide (ii), amino acids with suitable functions (e.g. cysteines, lysines, aspartates, glutamates) can also be attached to the sequence, or amino acids of the polypeptide sequence can be substituted by such amino acid functions. Methods for the mutagenesis or manipulation of nucleic acid molecules are sufficiently known to the person skilled in the art. A few selected methods are described below.

[0199] The binding of the reaction product resulting from the above-described step (a) with the keratin-binding polypeptide (i) takes place via the second anchor group of the linker molecule which is still free. Besides the above-described coupling reactions, suitable anchor groups of this type are particularly sulfhydryl-reactive groups (e.g. maleimides, pydridyldisulfides, α-haloacetyls, vinylsulfones, sulfatoalkylsulfones (preferably sulfatoethylsulfones and also thiols), by means of which the linker can enter into a covalent bond with a cysteine radical of the keratin-binding polypeptide (i).

[0200] Preference is given to a covalent linkage of the linker molecule (iii) to the keratin-binding polypeptide (i). This can take place, for example, via the side chains of the keratin-binding polypeptide (i), in particular via amino functions, hydroxy functions, carboxylate functions or thiol functions. Preference is given to a linkage via the amino functions of one or more lysine radicals, one or more thiol groups of cysteine radicals, one or more hydroxyl groups of serine, threonine or tyrosine radicals, one or more carboxyl groups of aspartic acid or glutamic acid radicals or via the N-terminal or C-terminal function of the keratin-binding polypeptide (ii). Apart from the amino acid functions occurring in the primary sequence of the keratin-binding polypeptide (ii), amino acids with suitable functions (e.g. cysteines, lysines, aspartates, glutamates) can also be added to the sequence, or amino acids of the polypeptide sequence can be substituted by such amino acid functions. Methods for the mutagenesis or manipulation of nucleic acid molecules are sufficiently known to the person skilled in the art. A few selected methods are described below.

[0201] The success of the effector coupling can be monitored using three different tests:
[0202] (i) Ellmann test in which the number of free Cys-SH groups in the protein can be determined before and after effector coupling. Here, a considerable reduction in the free SH groups after coupling indicates good reaction progress (see Example 17).
[0203] (ii) Activity test in which the binding of the keratin-binding polypeptide with and without coupled linker effector protein to hair can be measured (see Example 16).
[0204] (iii) Determination of the molar mass of the coupled protein.

[0205] The keratin-binding polypeptides (i) according to the invention have a wide field of use in human cosmetics, in particular skin care, nail care and hair care, in animal care, leather care and leather working.

[0206] Preferably, the keratin-binding effector proteins according to the invention are used for skin cosmetics and hair cosmetics. They permit a high concentration and long action time of care or protecting effector molecules.

[0207] In a particularly preferred embodiment of the present invention, keratin-binding polypeptides are used which have a binding affinity to human skin keratin, hair keratin or nail keratin.

[0208] The present invention particularly preferably provides keratin-binding effector proteins in which
[0209] s) the keratin-binding polypeptide used comprises one of the sequences shown in the SEQ ID No.: 2, 4, 6, 8, 10, 12, 14, 16, 18, 20, 22, 24, 26, 28, 30, 32, 34, 36, 38, 40, 42, 44, 46, 48, 50, 52, 54, 56, 58, 60, 62, 64, 66, 68, 70, 72, 74, 76, 78, 80, 82, 84, 86, 88, 90, 92, 94, 96, 98, 100, 102, 104, 106, 108, 110, 112, 114, 116, 118, 120, 122, 124, 126, 128, 130, 132, 134, 136, 138, 140, 146, 150, 153, 156, 157, 158, 160, 162, 164, 166, 213 or 215, preferably in SEQ ID NO: 2, 4, 6, 8, 10, 12, 14, 40, 42, 44, 46, 48, 146, 150, 153, 156, 157, 158, 160, 164, 166, 213 or 215, particularly preferably 166 and 213, most preferably 213 and
[0210] t) the effector polypeptide (ii) is chosen from the group of silk proteins, preferably the C16 spider silk protein, which is a 16-fold repetition of the C modulus of the protein ADF4 from Araneus diadematus, optionally
[0211] u) the proteins specified under s) and t) can also be coupled together via a linker molecule.

[0212] The present invention further provides the use of the keratin-binding effector molecules produced according to the invention in dermocosmetic preparations. Preferably, the keratin-binding effector molecules according to the invention are used in skin and hair cosmetics. They permit a high concentration and long action time of skin care or skin-protecting effector substances.

[0213] In a preferred embodiment of the present invention, the keratin-binding effector proteins according to the invention are used in skin protection compositions, skincare compositions, skin cleansing compositions, hair protection compositions, haircare compositions, hair cleansing compositions, hair colorants or in products for decorative cosmetics.

[0214] In a preferred embodiment of the present invention, a keratin-binding effector protein according to the invention is added to the dermocosmetics in a concentration of from 0.001 to 1 percent by weight (% by wt.), preferably 0.01 to 0.9% by weight, particularly preferably 0.01 to 0.8% by weight or 0.01 to 0.7% by weight, very particularly preferably 0.01 to 0.6% by weight or 0.01 to 0.5% by weight, most preferably 0.01 to 0.4% by weight or 0.01 to 0.3% by weight, based on the total weight of the composition. In a further embodiment, the compositions comprise a keratin-binding effector protein according to the invention in a concentration of from 1 to 10% by weight, preferably 2 to 8% by weight, 3 to 7% by weight, 4 to 6% by weight, based on the total weight of the composition. In a likewise preferred embodiment, the compositions comprise a keratin-binding effector protein according to the invention in a concentration of from 10 to 20% by weight, preferably 11 to 19% by weight, 12 to 18% by weight, 13 to 17% by weight, 14 to 16% by weight, based on the total weight of the composition. In a moreover preferred embodiment the compositions comprise a keratin-binding effector protein according to the invention in a concentration of from 20 to 30% by weight, preferably 21 to 29% by weight, 22 to 28% by weight, 23 to 27% by weight, 24 to 26% by weight, based on the total weight of the composition.

[0215] In another preferred embodiment, the abovementioned keratin-binding effector molecules according to the invention are used in dermocosmetics in combination with (i) cosmetic auxiliaries from the field of decorative cosmetics, (ii) dermocosmetic active ingredients and (iii) suitable auxiliaries and additives. Preferably, these are active ingredients and auxiliaries and additives which are used to protect the skin, hair and/or fingernails or toenails from damage, for treating existing damage to skin, hair and/or fingernails or toenails and for caring for skin, hair and/or fingernails or toenails. These active ingredients are preferably chosen from the group of natural or synthetic polymers, pigments, humectants, oils, waxes, enzymes, minerals, vitamins, sunscreens, dyes, fragrances, antioxidants, preservatives and/or pharmaceutical active ingredients.

[0216] Suitable auxiliaries and additives for producing hair cosmetic or skin cosmetic preparations are familiar to the person skilled in the art and can be found in cosmetics handbooks, for example Schrader, Grundlagen und Rezepturen der Kosmetika [Fundamentals and formulations of cosmetics], Hüthig Verlag, Heidelberg, 1989, ISBN 3-7785-1491-1, or Umbach, Kosmetik: Entwicklung, Herstellung und Anwendung kosmetischer Mittel [Cosmetics: development, manufacture and use of cosmetic compositions], 2nd expanded edition, 1995, Georg Thieme Verlag, ISBN 3 13 712602 9.

[0217] Preferably, the keratin-binding effector molecules according to the invention are used in dermocosmetics or compositions for oral care, dental care and denture care in combination with at least one constituent different therefrom which is chosen from cosmetically active ingredients, emulsifiers, surfactants, preservatives, perfume oils, thickeners, hair polymers, hair and skin conditioners, graft polymers, water-soluble or dispersible silicone-containing polymers, photoprotective agents, bleaches, gel formers, care agents, colorants, tinting agents, tanning agents, dyes, pigments, consistency regulators, humectants, refatting agents, collagen, protein hydrolyzates, lipids, antioxidants, antifoams, antistats, emollients and softeners. The active ingredients can also be present in the cosmetic preparations in encapsulated form, as described in the patents/patent applications EP 00974775 B1, DE 2311 712, EP 0278 878>DE 1999 47147, EP 0706822B1 and WO 98/16621, to which reference is hereby expressly made.

[0218] Advantageously, the antioxidants are chosen from the group consisting of amino acids (e.g. glycine, histidine, tyrosine, tryptophan) and derivatives thereof, imidazoles (e.g. urocanic acid) and derivatives thereof, peptides such as D,L-carnosine, D-carnosine, L-carnosine and derivatives thereof (e.g. anserine), carotenoids, carotenes (e.g. β-carotene, lycopene) and derivatives thereof, chlorogenic acid and derivatives thereof, lipoic acid and derivatives thereof (e.g. dihydrolipoic acid), aurothioglucose, propylthiouracil and other thiols (e.g. thiorodoxin, glutathione, cysteine, cystine, cystamine and the glycosyl, N-acetyl, methyl, ethyl, propyl, amyl, butyl and lauryl, palmitoyl, oleyl, γ-linoleyl, cholesteryl and glyceryl esters thereof) and salts thereof, dilauryl thiodipropionate, distearyl thiodipropionate, thiodipropionic acid and derivatives thereof (esters, ethers, peptides, lipids, nucleotides, nucleosides and salts), and sulfoximine compounds (e.g. buthionine sulfoximines, homocysteine sulfoximines, buthionine sulfones, penta-, hexa-, heptathionine sulfoximine) in very low tolerated doses (e.g. pmol to μmol/kg), also (metal) chelating agents (e.g. α-hydroxy fatty acids, palmitic acid, phytic acid, lactoferrin), α-hydroxy acids (e.g. citric acid, lactic acid, malic acid), humic acid, bile acid, bile extracts, bilirubin, biliverdin, EDTA and derivatives thereof, unsaturated fatty acids and derivatives thereof (e.g. γ-linolenic acid, linoleic acid, oleic acid), folic acid and derivatives thereof, ubiquinone and ubiquinol and derivatives thereof, vitamin C and derivatives thereof (e.g. sodium ascorbate, ascorbyl palmitate, Mg ascorbyl phosphate, ascorbyl acetate), tocopherol and derivatives (e.g. vitamin E acetate, tocotrienol), vitamin A and derivatives (vitamin A paimitate), and coniferyl benzoate of benzoin resin, rutinic acid and derivatives thereof α-glycosylrutin, ferulic acid, furfurylideneglucitol, carnosine, butylhydroxytoluene, butylhydroxyanisole, nordihydroguaiacic acid, nordihydroguaiaretic acid, trihydroxybutyrophenone, uric acid and derivatives thereof, mannose and derivatives thereof, zinc and derivatives thereof (e.g. ZnO, ZnSO₄), selenium and derivatives thereof (e.g. selenomethionine), stilbenes and derivatives thereof (e.g. stilbene oxide, trans-stilbene oxide).

[0219] The vitamins, provitamins or vitamin precursors of the vitamin B group or derivatives thereof and the derivatives of 2-furanone to be used with preference according to the invention include, inter alia:

[0220] Vitamin B₁, trivial name thiamine, chemical name 3-[(4′-amino-2′-methyl-5′-pyrimidinyl)methyl]-5-(2-hydroxyethyl)-4-methylthiazolium chloride.

[0221] Vitamin B2, trivial name riboflavin, chemical name 7,8-dimethyl-10-(1-D-ribityl)-benzo[g]pteridine-2,4(3H,10H)-dione. In free form, riboflavin occurs, for example, in whey, other riboflavin derivatives can be isolated from bacteria and yeasts. A stereoisomer of riboflavin which is likewise suitable according to the invention is lyxoflavin, which can be isolated from fish meal or liver and bears a D-arabityl radical instead of the D-ribityl radical.

[0222] Vitamin B3. The compounds nicotinic acid and nicotinamide (niacinamide) often bear this name. According to the invention, preference is given to nicotinamide.

[0223] Vitamin B₅ (pantothenic acid and panthenol). Preference is given to using panthenol. Derivatives of panthenol which can be used according to the invention are, in particular, the esters and ethers of panthenol, and cationically derivatized panthenols. In a further preferred embodiment of the invention, derivatives of 2-furanone can also be used in addition to pantothenic acid or panthenol. Particularly preferred derivatives are the also commercially available substances dihydro-3-hydroxy-4,4-dimethyl-2(3H)-furanone with the trivial name pantolactone (Merck), 4-hydroxymethyl-γ-butyrolactone (Merck), 3,3-dimethyl-2-hydroxy-γ-butyrolactone (Aldrich) and 2,5-dihydro-5-methoxy-2-furanone (Merck), with all stereoisomers being expressly included.

[0224] These compounds advantageously impart moisturizing and skin-calming properties to the dermocosmetics according to the invention.

[0225] Vitamin B₆, which is not understood here as meaning a uniform substance, but the derivatives of 5-hydroxymethyl-2-methylpyridin-3-ol known under the trivial names pyridoxin, pyridoxamine and pyridoxal.

[0226] Vitamin B₇ (biotin), also referred to as vitamin H or “skin vitamin”. Biotin is (3aS,4S,6aR)-2-oxohexahydrothienol[3,4-d]imidazole-4-valeric acid.

[0227] Panthenol, pantolactone, nicotinamide and biotin are very particularly preferred according to the invention.

### Dyes

[0228] Dyes which can be used are the substances approved and suitable for cosmetic purposes, as are listed, for example, in the publication “Kosmetische Färbemittel” [Cosmetic Colorants] from the Farbstoffkommission der Deutschen Forschungsgemeinschaft [Dyes Commission of the German Research Society], published by Verlag Chemie, Weinheim, 1984. These dyes are usually used in concentrations of from 0.001 to 0.1% by weight, based on the total mixture.

### Pigments

[0229] In a preferred embodiment, the compositions according to the invention comprise at least one pigment. The pigments are present in the product mass in undissolved form and may be present in an amount of from 0.01 to 25% by weight, particularly preferably from 5 to 15% by weight. The preferred particle size is 1 to 200 □m, in particular 3 to 150 □m, particularly preferably 10 to 100 □m. The pigments are colorants which are virtually insoluble in the application medium and may be inorganic or organic. Inorganic-organic mixed pigments are also possible. Preference is given to inorganic pigments. The advantage of the inorganic pigments is their excellent photostability, weather stability and thermal stability. The inorganic pigments may be of natural origin, for example prepared from chalk, ochre, umber, green earth, burnt sienna or graphite. The pigments may be white pigments, such as, for example, titanium dioxide or zinc oxide, black pigments, such as, for example, iron oxide black, colored pigments, such as, for example, ultramarine or iron oxide red, pearlescent pigments, metal effect pigments, pearlescent pigments and fluorescent or phosphorescent pigments, where preferably at least one pigment is a colored, non-white pigment. Metal oxides, hydroxides and oxide hydrates, mixed-phase pigments, sulfur-containing silicates, metal sulfides, complex metal cyanides, metal sulfates, chromates and molybdates, and the metals themselves (bronze pigments) are suitable. Of particular suitability are titanium dioxide (CI 77891), black iron oxide (CI 77499), yellow iron oxide (CI 77492), red and brown iron oxide (CI 77491), manganese violet (CI 77742), ultramarine (sodium aluminum sulfosilicates, CI 77007, Pigment Blue 29), chromium oxide hydrate (CI 77289), iron blue (ferric ferrocyanide, CI 77510), carmine (cochineal). Particular preference is given to pearlescent pigments and colored pigments based on mica which are coated with a metal oxide or a metal oxychloride, such as titanium dioxide or bismuth oxychloride, and if appropriate further color-imparting substances, such as iron oxides, iron blue, ultramarine, carmine etc., and where the color can be determined by varying the layer thickness. Pigments of this type are sold, for example, under the trade names Rona®, Colorona®, Dichrona® and Timiron® (Merck). Organic pigments are, for example, the natural pigments sepia, gamboge, Cassel brown, indigo, chlorophyll and other plant pigments. Synthetic organic pigments are, for example, azo pigments, anthraquinoids, indigoids, dioxazine, quinacridone, phthalocyanine, isoindolinone, perylene and perinone, metal complex, alkali blue and diketopyrrolopyrrole pigments.

[0230] In one embodiment, the keratin-binding effector molecules according to the invention and/or produced according to the inventive method are used with at least one particulate substance which is present in the composition in an amount of from 0.01 to 10, preferably from 0.05 to 5% by weight. Suitable substances are, for example, substances which are solid at room temperature (25° C.) and are in the form of particles. For example, silica, silicates, aluminates, clay earths, mica, salts, in particular inorganic metal salts, metal oxides, e.g. titanium dioxide, minerals and polymer particles are suitable. The particles are present in the composition in undissolved, preferably stably dispersed form and are able, following application to the application surface and evaporation of the solvent, to be deposited in solid form. Preferred particulate substances are silica (silica gel, silicon dioxide) and metal salts, in particular inorganic metal salts, where silica is particularly preferred. Metal salts are, for example, alkali metal or alkaline earth metal halides, such as sodium chloride or potassium chloride; alkali metal or alkaline earth metal sulfates, such as sodium sulfate or magnesium sulfate.

### Pearlizing Agents

[0231] Suitable pearlizing agents are, for example: alkylene glycol esters, specifically ethylene glycol disterate; fatty acid alkanolamides, specifically coconut fatty acid diethanolamide; partial glycerides, specifically stearic acid monoglyceride; esters of polybasic, optionally hydroxy-substituted carboxylic acids with fatty alcohols having 6 to 22 carbon atoms, specifically long-chain esters of tartaric acid; fatty substances, such as, for example, fatty alcohols, fatty ketones, fatty aldehydes, fatty ethers and fatty carbonates, which have in total at least 24 carbon atoms, specifically laurone and distearyl ether; fatty acids, such as stearic acid, hydroxystearic acid or behenic acid, ring-opening products of olefin epoxides having 12 to 22 carbon atoms with fatty alcohols having 12 to 22 carbon atoms and/or polyols having 2 to 15 carbon atoms and 2 to 10 hydroxyl groups, and mixtures thereof.

[0232] Customary thickeners in such formulations are crosslinked polyacrylic acids and derivatives thereof polysaccharides and derivatives thereof, such as xanthan gum, agar agar, alginates or tyloses, cellulose derivatives, e.g. carboxymethylcellulose or hydroxycarboxymethylcellulose, fatty alcohols, monoglycerides and fatty acids, polyvinyl alcohol and polyvinylpyrrolidone. Preference is given to using nonionic thickeners.

[0233] Suitable cosmetically and/or dermocosmetically active ingredients are, for example, coloring active ingredients, skin and hair pigmentation agents, tinting agents, tanning agents, bleaches, keratin-hardening substances, antimicrobial active ingredients, photofilter active ingredients, repellent active ingredients, hyperemic substances, keratolytically and keratoplastically effective substances, antidandruff active ingredients, antiphlogistics, keratinizing substances, antioxidative active ingredients and/or active ingredients which act as free-radical scavengers, skin moisturizing or humectant substances, refatting active ingredients, antierythematous or antiallergic active ingredients, branched fatty acids, such as 18-methyleicosanoic acid, and mixtures thereof.

[0234] Artificially skin-tanning active ingredients which are suitable for tanning the skin without natural or artificial radiation with UV rays are, for example, dihydroxyacetone, alloxan and walnut shell extract. Suitable keratin-hardening substances are usually active ingredients, as are also used in antiperspirants such as, for example, potassium aluminum sulfate, aluminum hydroxychloride, aluminum lactate, etc.

[0235] Antimicrobial active ingredients are used to destroy microorganisms or to inhibit their growth and thus serve both as preservative and as deodorizing substance which reduces the formation or the intensity of body odor. These include, for example, customary preservatives known to the person skilled in the art, such as p-hydroxybenzoic esters, imidazolidinylurea, formaldehyde, sorbic acid, benzoic acid, salicylic acid, etc. Such deodorizing substances are, for example, zinc ricinoleate, triclosan, undecylenic acid alkylolamides, triethyl citrate, chlorhexidine etc.

[0236] Suitable preservatives to be used advantageously according to the invention are:

TABLE 3
Suitable preservatives. The E numbers listed in the table above
are the designations used in the guideline 95/2/EEC.

| | |
|---|---|
| E 200 | Sorbic acid |
| E 201 | Sodium sorbate |
| E 202 | Potassium sorbate |
| E 203 | Calcium sorbate |
| E 210 | Benzoic acid |
| E 211 | Sodium benzoate |
| E 212 | Potassium benzoate |
| E 213 | Calcium benzoate |
| E 214 | Ethyl p-hydroxybenzoate |
| E 215 | Ethyl p-hydroxybenzoate Na salt |
| E 216 | n-Propyl p-hydroxybenzoate |
| E 217 | n-Propyl p-hydroxybenzoate Na salt |
| E 218 | Methyl p-hydroxybenzoate |
| E 219 | Methyl p-hydroxybenzoate Na salt |
| E 220 | Sulfur dioxide |
| E 221 | Sodium sulfite |
| E 222 | Sodium hydrogensulfite |
| E 223 | Sodium disulfite |
| E 224 | Potassium disulfite |
| E 226 | Calcium sulfite |
| E 227 | Calcium hydrogensulfite |
| E 228 | Potassium hydrogensulfite |
| E 230 | Biphenyl (diphenyl) |
| E 231 | Orthophenylphenol |
| E 232 | Sodium orthophenylphenoxide |
| E 233 | Thiabendazole |
| E 235 | Natamycin |
| E 236 | Formic acid |
| E 237 | Sodium formate |
| E 238 | Calcium formate |
| E 239 | Hexamethylenetetramine |
| E 249 | Potassium nitrite |
| E 250 | Sodium nitrite |
| E 251 | Sodium nitrate |
| E 252 | Potassium nitrate |
| E 280 | Propionic acid |
| E 281 | Sodium propionate |
| E 282 | Calcium propionate |
| E 283 | Potassium propionate |
| E 290 | Carbon dioxide |

[0237] Also suitable according to the invention are preservatives or preservative auxiliaries customary in cosmetics dibromodicyanobutane (2-bromo-2-bromomethylglutarodinitrile), 3-iodo-2-propynyl butylcarbamate, 2-bromo-2-nitropropane-1,3-diol, imidazolidinylurea, 5-chloro-2-methyl-4-isothiazolin-3-one, 2-chloroacetamide, benzalkonium chloride and benzyl alcohol. Also suitable as preservatives are phenyl hydroxyalkyl ethers, in particular the compound known under the name phenoxyethanol on account of its bactericidal and fungicidal effects on a number of microorganisms.

[0238] Other antimicrobial agents are likewise suitable for being incorporated into the preparations according to the invention. Advantageous substances are, for example, 2,4,4′-trichloro-2′-hydroxydiphenyl ether (irgasan), 1,6-di(4-chlorophenylbiguanido)hexane (chlorhexidine), 3,4,4′-trichlorocarbanilide, quaternary ammonium compounds, oil of cloves, mint oil, thyme oil, triethyl citrate, farnesol (3,7,11-trimethyl-2,6,10-dodecatrien-1-ol), and the active ingredients or active ingredient combinations described in the patent laid-open specifications DE-37 40 186, DE-39 38 140, DE-42 04 321, DE-42 29 707, DE-43 09 372, DE-44 11 664, DE-195 41 967, DE-195 43 695, DE-195 43 696, DE-195 47 160, DE-196 02 108, DE-196 02 110, DE-196 02 111, DE-196 31 003, DE-196 31 004 and DE-196 34 019 and the patent specifications DE-42 29 737, DE-42 37 081, DE-43 24 219, DE-44 29 467, DE-44 23 410 and DE-195 16 705. Sodium hydrogencarbonate is also to be used advantageously. Microbial polypeptides can also likewise be used.

### Perfume Oils

[0239] If appropriate, the cosmetic compositions can comprise perfume oils. Perfume oils which may be mentioned are, for example, mixtures of natural and synthetic fragrances. Natural fragrances are extracts from flowers (lily, lavender, rose, jasmine, neroli, ylang ylang), stems and leaves (geranium, patchouli, petitgrain), fruits (aniseed, coriander, caraway, juniper), fruit peels (bergamot, lemon, orange), roots (mace, angelica, celery, cardamom, costus, iris, calmus), woods (pinewood, sandalwood, guaiac wood, cedarwood, rosewood), herbs and grasses (tarragon, lemongrass, sage, thyme), needles and branches (spruce, fir, pine, dwarf-pine), resins and balsams (galbanum, elemi, benzoin, myrrh, olibanum, opoponax). Also suitable are animal raw materials, such as, for example, civet and castoreum. Typical synthetic fragrance compounds are products of the ester type, ether type, aldehyde type, ketone type, alcohol type and hydrocarbon type. Fragrance compounds of the ester type are, for example, benzyl acetate, phenoxyethyl isobutyrate, 4-tert-butyl cyclohexylacetate, linalyl acetate, dimethylbenzylcarbinyl acetate, phenylethyl acetate, linalyl benzoate, benzyl formate, ethyl methylphenyl glycinate, allyl cyclohexylpropionate, styrallyl propionate and benzyl salicylate. The ethers include, for example, benzyl ethyl ether, the aldehydes include, for example, the alkanals having 8 to 18 carbon atoms, citral, citronellal, citronellyloxyacetaldehyde, cyclamenaldehyde, hydroxycitronellal lilial and bourgeonal, the ketones include, for example, the ionones, α-isomethylionene and methyl cedryl ketone, the alcohols include anethol, citronellol, eugenol, isoeugenol, geraniol, linalool, phenylethyl alcohol and terpeneol, the hydrocarbons include primarily the terpenes and balsams. However, preference is given to using mixtures of different fragrances which together produce a pleasant scent note. Essential oils of relatively low volatility, which are mostly used as aroma components, are also suitable as perfume oils, e.g. sage oil, camomile oil, oil of cloves, melissa oil, mint oil, cinnamon leaf oil, linden blossom oil, juniper berry oil, vetiver oil, olibanum oil, galbanum oil, labolanum oil and lavandin oil. Preferably, bergamot oil, dihydromyrcenol, lilial, lyral, citronellol, phenylethyl alcohol, □-hexylcinnamaldehyde, geraniol, benzylacetone, cyclamenaldehyde, linalool, Boisambrene®Forte, ambroxan, indole, hedione, sandelice, lemon oil, mandarin oil, orange oil, allyl amyl glycolate, cyclovertal, lavandin oil, clary sage oil, □-damascone, geranium oil bourbon, cyclohexyl salicylate, Vertofix®Coeur, Iso-E-Super®, Fixolide®NP, evernyl, iraldein gamma, phenylacetic acid, geranyl acetate, benzyl acetate, rose oxide, romillate, irotyl and floramate, alone or in mixtures, are used.

### Oils, Fats and Waxes

[0240] Preferably, the compositions according to the invention comprise oils, fats and/or waxes. Constituents of the oil phase and/or fat phase of the compositions according to the invention are advantageously chosen from the group of lecithins and fatty acid triglycerides, namely the triglycerol esters of saturated and/or unsaturated, branched and/or unbranched alkanecarboxylic acids of chain length from 8 to 24, in particular 12 to 18, carbon atoms. The fatty acid triglycerides can, for example, advantageously be chosen from the group of synthetic, semisynthetic and natural oils, such as, for example, olive oil, sunflower oil, soya oil, peanut oil, rapeseed oil, almond oil, palm oil, coconut oil, castor oil, wheat germ oil, grapeseed oil, thistle oil, evening primrose oil, macadamia nut oil and the like. Further polar oil components can be chosen from the group of esters of saturated and/or unsaturated, branched and/or unbranched alkanecarboxylic acids of chain length from 3 to 30 carbon atoms and saturated and/or unsaturated, branched and/or unbranched alcohols of chain length from 3 to 30 carbon atoms, and from the group of esters of aromatic carboxylic acids and saturated and/or unsaturated, branched and/or unbranched alcohols of chain length from 3 to 30 carbon atoms. Such ester oils can then advantageously be chosen from the group consisting of isopropyl myristate, isopropyl palmitate, isopropyl stearate, isopropyl oleate, n-butyl stearate, n-hexyl laurate, n-decyl oleate, isooctyl stearate, isononyl stearate, isononyl isononanoate, 2-ethylhexyl palmitate, 2-ethylhexyl laurate, 2-hexyldecyl stearate, 2-octyldodecyl palmitate, oleyl oleate, oleyl erucate, erucyl oleate, erucyl erucate dicaprylylcarbonate (cetiol CC) and cocoglycerides (myritol 331), butylene glycol dicaprylate/dicaprate and dibutyl adipate, and synthetic, semisynthetic and natural mixtures of such esters, such as, for example, jojoba oil.

[0241] In addition, one or more oil components can advantageously be chosen from the group of branched and unbranched hydrocarbons and hydrocarbon waxes, silicone oils, dialkyl ethers, the group of saturated or unsaturated, branched or unbranched alcohols. Any mixtures of such oil and wax components are also to be used advantageously for the purposes of the present invention. If appropriate, it may also be advantageous to use waxes, for example cetyl palmitate, as the sole lipid component of the oil phase. According to the invention, the oil component is advantageously chosen from the group consisting of 2-ethylhexyl isostearate, octyldodecanol, isotridecyl isononanoate, isoeicosane, 2-ethylhexyl cocoate, C12-15-alkyl benzoate, caprylic/capric triglyceride, dicaprylyl ether. According to the invention, mixtures of C12-15-alkyl benzoate and 2-ethylhexyl isostearate, mixtures of C12-15-alkyl benzoate and isotridecyl isononanoate, and mixtures of C12-15-alkyl benzoate, 2-ethylhexyl isostearate and isotridecyl isononanoate are advantageous. According to the invention, the oils with a polarity of from 5 to 50 mN/m particularly preferably used are fatty acid triglycerides, in particular soya oil and/or almond oil. Of the hydrocarbons, paraffin oil, squalane and squalene are to be used advantageously for the purposes of the present invention.

[0242] In addition, the oil phase can advantageously be chosen from the group of Guerbet alcohols. Guerbet alcohols are named after Marcel Guerbet who described their preparation for the first time. They form in accordance with the reaction equation

[chemical structure]

by oxidation of an alcohol to give an aldehyde, by aldol condensation of the aldehyde, elimination of water from the aldol and hydrogenation of the allyl aldehyde. Guerbet alcohols are liquid even at low temperatures and cause virtually no skin irritations. They can be used advantageously as fatting, superfatting and also refatting constituents in cosmetic compositions.

[0243] The use of Guerbet alcohols in cosmetics is known per se. Such species are then mostly characterized by the structure

[chemical structure]

[0244] Here, R₁ and R₂ are usually unbranched alkyl radicals.

[0245] According to the invention, the Guerbet alcohol or alcohols are advantageously chosen from the group where

R₁=propyl, butyl, pentyl, hexyl, heptyl or octyl and
R₂=hexyl, heptyl, octyl, nonyl, decyl, undecyl, dodecyl, tridecyl or tetradecyl.

[0246] Guerbet alcohols preferred according to the invention are 2-butyloctanol (commercially available for example as Isofol®12 (Condea)) and 2-hexyldecanol (commercially available for example as Isofol®16 (Condea)). Mixtures of Guerbet alcohols according to the invention are also to be used advantageously according to the invention, such as, for example, mixtures of 2-butyloctanol and 2-hexyldecanol (commercially available for example as Isofol®14 (Condea)).

[0247] Any mixtures of such oil and wax components are also to be used advantageously for the purposes of the present invention. Among the polyolefins, polydecenes are the preferred substances.

[0248] The oil component can also advantageously have a content of cyclic or linear silicone oils or consist entirely of such oils, although it is preferred to use an additional content of other oil phase components apart from the silicone oil or the silicone oils. Low molecular weight silicones or silicone oils are generally defined by the following general formula:

[chemical structure]

[0249] Higher molecular weight silicones or silicone oils are generally defined by the following general formula

[chemical structure]

where the silicon atoms may be substituted by identical or different alkyl radicals and/or aryl radicals, which are shown here in general terms by the radicals R₁ to R₄. However, the number of different radicals is not necessarily limited to up to 4. m here can assume values from 2 to 200 000.

[0250] Cyclic silicones to be used advantageously according to the invention are generally defined by the following general formula

[chemical structure]

where the silicon atoms can be substituted by identical or different alkyl radicals and/or aryl radicals, which are shown here in general terms by the radicals R₁ to R₄. However, the number of different radicals is not necessarily limited to up to 4. n here can assume values from 3/2 to 20. Fractional values for n take into consideration that uneven numbers of siloxyl groups may be present in the cycle.

[0251] Advantageously, phenyltrimethicone is chosen as silicone oil. Other silicone oils, for example dimethicone, hexamethylcyclotrisiloxane, phenyldimethicone, cyclomethicone (octamethylcyclotetrasiloxane), hexamethylcyclotrisiloxane, polydimethylsiloxane, poly(methylphenylsiloxane), cetyidimethicone, behenoxydimethicone are also to be used advantageously for the purposes of the present invention. Also advantageous are mixtures of cyclomethicone and isotridecyl isononanoate, and those of cyclomethicone and 2-ethylhexyl isostearate. However, it is also advantageous to choose silicone oils of similar constitution to the compounds referred to above whose organic side chains are derivatized, for example polyethoxylated and/or polypropoxylated. These include, for example, polysiloxane-polyalkyl polyether copolymers, such as, for example, cetyldimethicone copolyol. Cyclomethicone (octamethylcyclotetrasiloxane) is advantageously used as silicone oil to be used according to the invention. Fat and/or wax components to be used advantageously according to the invention can be chosen from the group of vegetable waxes, animal waxes, mineral waxes and petrochemical waxes. For example, candelilla wax, carnauba wax, Japan wax, esparto grass wax, cork wax, guaruma wax, rice germ oil wax, sugarcane wax, berry wax, ouricury wax, montan wax, jojoba wax, shea bufter, beeswax, shellac wax, spermaceti, lanolin (wool wax), uropygial grease, ceresine, ozokerite (earth wax), paraffin waxes and microwaxes are advantageous.

[0252] Further advantageous fat and/or wax components are chemically modified waxes and synthetic waxes, such as, for example, Syncrowax®HRC (glyceryl tribehenate), and Syncrowax®AW 1 C(C₁₈₋₃₆ fatty acid) and montan ester waxes, sasol waxes, hydrogenated jojoba waxes, synthetic or modified beeswaxes (e.g. dimethicone copolyol beeswax and/or C₃₀₋₅₀-alkyl beeswax), cetyl ricinoleates such as, for example, Tegosoft®CR, polyalkylene waxes, polyethylene glycol waxes, but also chemically modified fats, such as, for example, hydrogenated vegetable oils (for example hydrogenated castor oil and/or hydrogenated coconut fatty glycerides), triglycerides, such as, for example, hydrogenated soy glyceride, trihydroxystearin, fatty acids, fatty acid esters and glycol esters, such as, for example, C₂₀₋₄₀-alkyl stearate, C₂₀₋₄₀-alkylhydroxystearoyl stearate and/or glycol montanate. Furthermore, certain organosilicon compounds which have similar physical properties to the specified fat and/or wax components, such as, for example, stearoxytrimethylsilane, are also advantageous.

[0253] According to the invention, the fat and/or wax components can be used in the compositions either singly or as a mixture. Any mixtures of such oil and wax components are also to be used advantageously for the purposes of the present invention. Advantageously, the oil phase is chosen from the group consisting of 2-ethylhexyl isostearate, octyidodecanol, isotridecyl isononanoate, butylene glycol dicaprylateldicaprate, 2-ethylhexyl cocoate, C₁₂₋₁₅-alkyl benzoate, caprylic/capric triglyceride, dicaprylyl ether. Mixtures of octyldodecanol, caprylic/capric triglyceride, dicaprylyl ether, dicaprylyl carbonate, cocoglycerides or mixtures of C₁₂₋₁₅-alkyl benzoate and 2-ethylhexyl isostearate, mixtures of C₁₂₋₁₅-alkyl benzoate and butylene glycol dicaprylate/dicaprate, and mixtures of C₁₂₋₁₅-alkyl benzoate, 2-ethylhexyl isostearate and isotridecyl isononanoate are particularly advantageous. Of the hydrocarbons, paraffin oil, cycloparaffin, squalane, squalene, hydrogenated polyisobutene and polydecene are to be used advantageously for the purposes of the present invention.

[0254] The oil component is also advantageously chosen from the group of phospholipids. Phospholipids are phosphoric esters of acylated glycerols. Of greatest importance among the phosphatidylcholines are, for example, the lecithins, which are characterized by the general structure

[chemical structure]

where R′ and R″ are typically unbranched aliphatic radicals having 15 or 17 carbon atoms and up to 4 cis double bonds.

[0255] According to the invention, Merkur Weissoel Pharma 40 from Merkur Vaseline, Shell Ondina® 917, Shell Ondina® 927, Shell Oil 4222, Shell Ondina®933 from Shell & DEA Oil, Pionier® 6301 S, Pionier® 2071 (Hansen & Rosenthal) can be used as paraffin oil advantageous according to the invention. Suitable cosmetically compatible oil and fat components are described in Karl-Heinz Schrader, Grundlagen und Rezepturen der Kosmetika [Fundamentals and formulations of cosmetics], 2nd edition, Verlag Hüthig, Heidelberg, pp. 319-355, to the entire scope of which reference is hereby made.

### Solvents

[0256] If the keratin-binding effector molecules according to the invention and/or produced according to the inventive method are used in cosmetic or dermatological preparations which are a solution or emulsion or dispersion, solvents which can be used are:

water or aqueous solutions; oils, such as triglycerides of capric acid or caprylic acid, but preferably castor oil; fats, waxes and other natural and synthetic fatty substances, preferably esters of fatty acids with alcohols of low carbon number, e.g. with isopropanol, propylene glycol or glycerol, or esters of fatty alcohols with alkanoic acids of low carbon number or with fatty acids; alcohols, diols or polyols of low carbon number, and ethers thereof, preferably ethanol, isopropanol, propylene glycol, glycerol, ethylene glycol, ethylene glycol monoethyl or monobutyl ether, propylene glycol monomethyl, monoethyl or monobutyl ether, diethylene glycol monomethyl or monoethyl ether and analogous products. In particular, mixtures of the abovementioned solvents are used. In the case of alcoholic solvents, water may be a further constituent.

### Surfactants

[0257] According to the invention, besides the keratin-binding effector molecules according to the invention and/or produced according to the inventive method, compositions can also comprise surfactants. Such surfactants are, for example:
[0258] phosphoric esters and salts, such as, for example, DEA-oleth-10 phosphate and dilaureth-4 phosphate,
[0259] alkylsulfonates, for example sodium coconut monoglyceride sulfate, sodium C₁₂₋₁₄ olefinsulfonate, sodium lauryl sulfoacetate and magnesium PEG-3 cocamide sulfate,
[0260] carboxylic acids and derivatives, such as, for example, lauric acid, aluminum stearate, magnesium alkanolate and zinc undecylenate, ester carboxylic acids, for example calcium stearoyl lactylate, laureth-6 citrate and sodium PEG-4 lauramide carboxylate,
[0261] esters which are formed by esterification of carboxylic acids with ethylene oxide, glycerol, sorbitan or other alcohols,
[0262] ethers, for example ethoxylated alcohols, ethoxylated lanolin, ethoxylated polysiloxanes, propoxylated POE ethers and alkyl polyglycosides, such as lauryl glucoside, decyl glycoside and cocoglycoside.

### Polysorbates

[0263] According to the invention, besides the keratin-binding effector molecules according to the invention and/or produced according to the inventive method, compositions may also comprise polysorbates. Polysorbates advantageous for the purposes of the invention here are
[0264] polyoxyethylene(20) sorbitan monolaurate (Tween 20, CAS No. 9005-64-S)
[0265] polyoxyethylene(4) sorbitan monolaurate (Tween 21, CAS No. 9005-64-5)
[0266] polyoxyethylene(4) sorbitan monostearate (Tween 61, CAS No. 9005-67-8)
[0267] polyoxyethylene(20) sorbitan tristearate (Tween 65, CAS No. 9005-71-4)
[0268] polyoxyethylene(20) sorbitan monooleate (Tween 80, CAS No. 9005-65-6)
[0269] polyoxyethylene(5) sorbitan monooleate (Tween 81, CAS No. 9005-65-5)
[0270] polyoxyethylene(20) sorbitan trioleate (Tween 85, CAS No. 9005-70-3).

[0271] Particularly advantageous are, in particular,
[0272] polyoxyethylene(20) sorbitan monopalmitate (Tween 40, CAS No, 9005-66-7)
[0273] polyoxyethylene(20) sorbitan monostearate (Tween 60, CAS No. 9005-67-8).

[0274] According to the invention, these are advantageously used in a concentration of from 0.1 to 5% by weight and in particular in a concentration of from 1.5 to 2.5% by weight, based on the total weight of the composition, individually or as a mixture of two or more polysorbates.

### Conditioning Agents

[0275] In a preferred embodiment of the invention, the compositions also comprise conditioning agents. Conditioning agents preferred according to the invention are, for example, all compounds which are listed in the International Cosmetic Ingredient Dictionary and Handbook (Volume 4, editor: R. C. Pepe, J. A. Wenninger, G. N. McEwen, The Cosmetic, Toiletry, and Fragrance Association, 9th edition, 2002) under section 4 under the keywords Hair Conditioning Agents, Humectants, Skin-Conditioning Agents, Skin-Conditioning Agents-Emollient, Skin-Conditioning Agents-Humectant, Skin-Conditioning Agents-Miscellaneous, Skin-Conditioning Agents-Occlusive and Skin Protectants, and all compounds listed in EP-A 934 956 (pp. 11-13) under “water soluble conditioning agent” and “oil soluble conditioning agent”. Further advantageous conditioning agents are, for example, the compounds referred to in accordance with INCI as Polyquaternium (in particular Polyquaternium-1 to Polyquaternium-56).

[0276] Suitable conditioning agents also include, for example, polymeric quaternary ammonium compounds, cationic cellulose derivatives and polysaccharides.

[0277] Conditioning agents advantageous according to the invention can here be chosen from the compounds shown in the table below.

TABLE 4
Conditioning agents to be used advantageously

| | | | Example |
|---|---|---|---|
| INCI name | CAS number | Type of polymer | (trade name) |
| Polyquaternium-2 | CAS 63451-27-4 | Urea, N,N′-bis[3-(dimethylamino)propyl] | Mirapol ® A-15 |
| | | polymer with 1,1′-oxybis(2-chloroethane) | |
| Polyquaternium-5 | CAS 26006-22-4 | Acrylamide, β-methacryloxyethyltriethyl- | |
| | | ammonium methosulfate | |
| Polyquaternium-6 | CAS 26062-79-3 | N,N-Dimethyl-N-2-propenyl-2- | Merquat ® 100 |
| | | propenaminium chloride | |
| Polyquaternium-7 | CAS 26590-05-6 | N,N-Dimethyl-N-2-propenyl-2- | Merquat ® S |
| | | propenaminium chloride, 2-propenamide | |
| Polyquaternium- | CAS 53568-66-4, 55353- | Quaternary ammonium salt of | Celquat ® SC- |
| 10 | 19-0, 54351-50-7, 68610- | hydroxyethylcellulose | 230M, Polymer |
| | 92-4, 81859-24-7 | | JR 400 |
| Polyquaternium- | CAS 53633-54-8 | Vinylpyrrolidone/dimethylaminoethyl | Gafquat ® |
| 11 | | methacrylate copolymer/diethyl sulfate | 755N |
| | | reaction product | |
| Polyquaternium- | CAS 29297-55-0 | Vinylpyrrolidone/vinylimidazolinum | Luviquat ® |
| 16 | | methochloride copolymer | HM552 |
| Polyquaternium- | CAS 90624-75-2 | | Mirapol ® AD-1 |
| 17 | | | |
| Polyquaternium- | CAS 110736-85-1 | Quaternized water-soluble polyvinyl | |
| 19 | | alcohol | |
| Polyquaternium- | CAS 110736-86-2 | Quaternized polyvinyl octadecyl ether | |
| 20 | | dispersible in water | |
| Polyquaternium- | | Polysiloxane | Abil ® B 9905 |
| 21 | | polydimethyldimethylammonium acetate | |
| | | copolymer | |
| Polyquaternium- | CAS 53694-17-0 | Dimethyldiallylammonium chloride/acrylic | Merquat ® 280 |
| 22 | | acid copolymer | |
| Polyquaternium- | CAS 107897-23-5 | Polymeric quaternary ammonium salt of | Quartisoft ® |
| 24 | | hydroxyethylcellulose | LM-200 |
| Polyquaternium- | CAS 131954-48-8 | Vinylpyrrolidone/methacrylamidopropyl- | Gafquat ® HS- |
| 28 | | trimethylammonium chloride copolymer | 100 |
| Polyquaternium- | CAS 92091-36-6, | Chitosan which has been reacted with | Lexquat ® CH |
| 29 | 148880-30-2 | propylene oxide and quaternized with | |
| | | epichlorohydrin | |
| Polyquaternium- | CAS 136505-02-7, | Polymeric quaternary ammonium salt | Hypan ® QT |
| 31 | 139767-67-7 | which is prepared by reacting DMAPA | 100 |
| | | acrylate/acrylic acid/acrylonitrogen acid | |
| | | copolymers and diethyl sulfate | |
| Polyquaternium- | CAS 35429-19-7 | N,N,N-Trimethyl-2-([2-methyl-1-oxo-2- | |
| 32 | | propenyl)oxy]ethanaminium chloride, | |
| | | polymer with 2-propenamide | |
| Polyquaternium- | CAS 26161-33-1 | | |
| 37 | | | |
| Polyquaternium- | | Copolymeric quaternary ammonium salt | |
| 44 | | of vinylpyrrolidone and quaternized | |
| | | imidazoline | |

[0278] Further conditioners advantageous according to the invention are cellulose derivatives and quaternized guar gum derivatives, in particular guar hydroxypropylammonium chloride (e.g. Jaguar Excel®, Jaguar C 162® (Rhodia), GAS 65497-29-2, GAS 39421-75-5).

[0279] Also, nonionic poly-N-vinylpyrrolidone/polyvinyl acetate copolymers (e.g. Luviskol®VA 64 (BASF Aktiengesellschaft)), anionic acrylate copolymers (e.g. Luviflex®Soft (BASF Aktiengesellschaft)), and/or amphoteric amide/acrylate/methacrylate copolymers (e.g. Amphomer® (National Starch)) can be used advantageously according to the invention as conditioners.

### Powder Raw Materials

[0280] An addition of powder raw materials may be generally advantageous. The use of talc is particularly preferred.

### Ethoxylated Glycerol Fatty Acid Esters

[0281] According to the invention, besides the keratin-binding effector molecules according to the invention and/or produced by the inventive method, compositions can, if appropriate, also comprise ethoxylated oils chosen from the group of ethoxylated glycerol fatty acid esters, particularly preferably PEG-10 olive oil glycerides, PEG-11 avocado oil glycerides, PEG-11 cocoa butter glycerides, PEG-13 sunflower oil glycerides, PEG-15 glyceryl isostearate, PEG-9 coconut fatty acid glycerides, PEG-54 hydrogenated castor oil, PEG-7 hydrogenated castor oil, PEG-60 hydrogenated castor oil, jojoba oil ethoxylate (PEG-26 jojoba fatty acids, PEG-26 jojoba alcohol), glycereth-5 cocoate, PEG-9 coconut fatty acid glycerides, PEG-7 glyceryl cocoate, PEG-45 palm kernel oil glycerides, PEG-35 castor oil, olive oil PEG-7 ester, PEG-6 caprylic/capric glycerides, hydrogenated palm kernel oil glyceride PEG-6 ester, PEG-20 corn oil glycerides, PEG-18 glyceryl oleate cocoate, PEG-40 hydrogenated castor oil, PEG-40 castor oil, PEG-60 hydrogenated castor oil, PEG-60 corn oil glycerides, PEG-54 hydrogenated castor oil, PEG-45 palm kernel oil glycerides, PEG-35 castor oil, PEG-80 glyceryl cocoate, PEG-60 almond oil glycerides, PEG-60 evening primrose glycerides, PEG-200, hydrogenated glyceryl palmate and PEG-90 glyceryl isostearate. Preferred ethoxylated oils are PEG-7 glyceryl cocoate, PEG-9 cocoglycerides, PEG-40 hydrogenated castor oil, PEG-200 hydrogenated glyceryl palmate. Ethoxylated glycerol fatty acid esters are used in aqueous cleaning formulations for a variety of purposes. Glycerol fatty acid esters with a low degree of ethoxylation (3-12 ethylene oxide units) usually serve as refatting agents for improving the feel of the skin after drying, glycerol fatty acid esters with a degree of ethoxylation of about 30-50 serve as solubility promoters for nonpolar substances such as perfume oils. Glycerol fatty acid esters with a high degree of ethoxylation are used as thickeners. One aspect all of these substances have in common is that they produce a particular feel on the skin when used on the skin in dilution with water.

### Photoprotective Agents

[0282] The use of the keratin-binding effector molecules according to the invention and/or produced according to the inventive method in combination with photoprotective agents in dermocosmetic preparations is likewise in accordance with the invention. These cosmetic and/or dermatological photoprotective compositions are used for cosmetic and/or dermatological photoprotection, and also for the treatment and care of the skin and/or of the hair and as make-up product in decorative cosmetics. These include, for example, sun creams, sun lotions, sun milks, sun oils, sun balsams, sun gels, lip care and lipsticks, concealing creams and sticks, moisturizing creams, lotions, emulsions, face, body and hand creams, hair treatments and rinses, hair-setting compositions, styling gels, hair sprays, roll-on deodorants or eye wrinkle creams, tropicals, sunblocks, aftersun preparations. All preparations comprise at least one keratin-binding effector molecule and one of the specified UV filter substances.

[0283] Sun oils are mostly mixtures of different oils with one or more photoprotective filters and perfume oils. The oil components are chosen according to different cosmetic properties. Oils which grease well and convey a soft feel to the skin, such as mineral oils (e.g. paraffin oils) and fatty acid triglycerides (e.g. peanut oil, sesame oil, avocado oil, medium-chain triglycerides), are mixed with oils which improve the spreadability and the absorption of the sun oils into the skin, reduce the stickiness and make the oil film permeable for air and water vapor (perspiration). These include branched-chain fatty acid esters (e.g. isopropyl palmitate) and silicone oils (e.g. dimethylsilicone). When using oils based on unsaturated fatty acids, antioxidants, e.g. E-tocopherol, are added in order to prevent them from becoming rancid. Sun oils, being anhydrous formulations, usually comprise no preservatives. Sun milks and sun creams are prepared as oil-in-water (O/W) emulsions and as water-in-oil (W/O) emulsions. Depending on the type of emulsion, the properties of the preparations are very variable: O/W emulsions are readily spreadable on the skin, they mostly absorb rapidly and can almost always be readily washed off with water. W/O emulsions are more difficult to rub in, they grease the skin to a more considerable degree and thus seem to be somewhat stickier, but on the other hand better protect the skin from drying out. W/O emulsions are mostly water-resistant. In the case of O/W emulsions, the emulsion basis, the selection of suitable photoprotective substances and, if appropriate, the use of auxiliaries (e.g. polymers) determine the degree of water resistance. The bases of liquid and cream-like O/W emulsions resemble other emulsions customary in skin care in terms of their composition. Sun milks should sufficiently grease skin dried out by sun, water and wind. They must not be sticky since this is perceived as being particularly unpleasant in the heat and upon contact with sand. The photoprotective agents are generally based on a carrier which comprises at least one oil phase. However, compositions solely on an aqueous basis are also possible. Accordingly, oils, oil-in-water and water-in-oil emulsions, fatty acids such as, for example, magnesium stearate, aluminum stearate and/or zinc stearate are used. Biogenic active ingredients are understood as meaning, for example, plant extracts, protein hydrolyzates and vitamin complexes. Customary film formers are, for example, hydrocolloids, such as chitosan, microcrystalline chitosan or quaternized chitosan, polyvinylpyrrolidone, vinylpyrrolidone-vinyl acetate copolymers, polymers of the acrylic acid series, quaternary cellulose derivatives and similar compounds.

[0284] Suitable photofilter active ingredients are substances which absorb UV rays in the UV-B and/or UV-A region. These are understood as meaning organic substances which are able to absorb ultraviolet rays and release the absorbed energy again in the form of longer-wave radiation, e.g. heat. The organic substances may be oil-soluble or water-soluble. Suitable UV filters are e.g. 2,4,6-triaryl-1,3,5-triazines in which the aryl groups can each carry at least one substituent which is preferably chosen from hydroxy, alkoxy, specifically methoxy, alkoxycarbonyl, specifically methoxycarbonyl and ethoxycarbonyl. Also suitable are p-aminobenzoic esters, cinnamic esters, benzophenones, camphor derivatives, and pigments which stop UV rays, such as titanium dioxide, talc and zinc oxide. Pigments based on titanium dioxide are particularly preferred.

[0285] Oil-soluble UV-B filters which may be used are, for example, the following substances:

3-benzylidenecamphor and derivatives thereof, e.g. 3-(4-methylbenzylidene)camphor;
4-aminobenzoic acid derivatives, preferably 2-ethylhexyl 4-(dimethylamino)benzoate, 2-octyl 4-(dimethylamino)benzoate and amyl 4-(dimethylamino)benzoate;
esters of cinnamic acid, preferably 2-ethylhexyl 4-methoxycinnamate, propyl 4-methoxycinnamate, isoamyl 4-methoxycinnamate, isopentyl 4-methoxycinnamate, 2-ethylhexyl 2-cyano-3-phenylcinnamate (octocrylene);
esters of salicylic acid, preferably 2-ethylhexyl salicylate, 4-isopropylbenzyl salicylate, homomethyl salicylate;
derivatives of benzophenone, preferably 2-hydroxy-4-methoxybenzophenone, 2-hydroxy-4-methoxy-4′-methylbenzophenone, 2,2′-dihydroxy-4-methoxybenzophenone;
esters of benzalmalonic acid, preferably 2-ethylhexyl 4-methoxybenzmalonate;
triazine derivatives, such as, for example, 2,4,6-trianilino-(p-carbo-2′-ethyl-1′-hexyloxy)-1,3,5-triazine (octyltriazone) and dioctylbutamidotriazone (Uvasorb® HEB);
propane-1,3-diones, such as, for example, 1-(4-tert-butylphenyl)-3-(4′-methoxyphenyl)propane-1,3-dione.

[0286] Suitable water-soluble substances are:

2-phenylbenzimidazole-5-sulfonic acid and the alkali metal, alkaline earth metal, ammonium alkylammonium, alkanolammonium and glucammonium salts thereof;
sulfonic acid derivatives of benzophenones, preferably 2-hydroxy-4-methoxybenzophenone-5-sulfonic acid and its salts;
sulfonic acid derivatives of 3-benzylidenecamphor, such as, for example, 4-(2-oxo-3-bornylidenemethyl)benzenesulfonic acid and 2-methyl-5-(2-oxo-3-bornylidene)sulfonic acid and salts thereof.

[0287] Particular preference is given to the use of esters of cinnamic acid, preferably 2-ethylhexyl 4-methoxycinnamate, isopentyl 4-methoxycinnamate, 2-ethylhexyl 2-cyano-3-phenylcinnamate (octocrylene).

[0288] Furthermore, the use of derivatives of benzophenone, in particular 2-hydroxy-4-methoxybenzophenone, 2-hydroxy-4-methoxy-4′-methylbenzophenone, 2,2′-dihydroxy-4-methoxybenzophenone, and the use of propane-1,3-diones, such as, for example, 1-(4-tert-butylphenyl)-3-(4′-methoxyphenyl)propane-1,3-dione is preferred.

[0289] Suitable typical UV-A filters are:

derivatives of benzoylmethane, such as, for example, 1-(4′-tert-butylphenyl)-3-(4′-methoxyphenyl)propane-1,3-dione, 4-tert-butyl-4′-methoxydibenzoylmethane or 1-phenyl-3-(4′-isopropylphenyl)propane-1,3-dione;
aminohydroxy-substituted derivatives of benzophenones, such as, for example, N,N-diethylaminohydroxybenzoyl n-hexylbenzoate.

[0290] The UV-A and UV-B filters can of course also be used in mixtures.

[0291] Further suitable UV filter substances are given in the table below.

TABLE 5
Suitable photoprotective agents

| | | CAS No. |
|---|---|---|
| No. | Substance | (=acid) |
| 1 | 4-Aminobenzoic acid | 150-13-0 |
| 2 | 3-(4′-Trimethylammonium)benzylidenebornan-2-one methyl sulfate | 52793-97-2 |
| 3 | 3,3,5-Trimethylcyclohexyl salicylate | 118-56-9 |
| | (homosalate) | |
| 4 | 2-Hydroxy-4-methoxybenzophenone | 131-57-7 |
| | (oxybenzone) | |
| 5 | 2-Phenylbenzimidazole-5-sulfonic acid and its potassium, sodium | 27503-81-7 |
| | and triethanolamine salts | |
| 6 | 3,3′-(1,4-Phenylenedimethine)bis(7,7-dimethyl- | 90457-82-2 |
| | 2-oxobicyclo[2.2.1]heptane-1-methanesulfonic acid) and its salts | |
| 7 | Polyethoxyethyl 4-bis(polyethoxy)aminobenzoate | 113010-52-9 |
| 8 | 2-Ethylhexyl 4-dimethylaminobenzoate | 21245-02-3 |
| 9 | 2-Ethylhexyl salicylate | 118-60-5 |
| 10 | 2-Isoamyl 4-methoxycinnamate | 71617-10-2 |
| 11 | 2-Ethylhexyl 4-methoxycinnamate | 5466-77-3 |
| 12 | 2-Hydroxy-4-methoxybenzophenone-5-sulfonic acid | 4065-45-6 |
| | (sulisobenzone) and the sodium salt | |
| 13 | 3-(4′-Sulfobenzylidene)bornan-2-one and salts | 58030-58-6 |
| 14 | 3-Benzylidenebornan-2-one | 16087-24-8 |
| 15 | 1-(4′-Isopropylphenyl)-3-phenylpropane-1,3-dione | 63260-25-9 |
| 16 | 4-Isopropylbenzyl salicylate | 94134-93-7 |
| 17 | 3-Imidazol-4-ylacrylic acid and its ethyl ester | 104-98-3 |
| 18 | Ethyl 2-cyano-3,3-diphenylacrylate | 5232-99-5 |
| 19 | 2′-Ethylhexyl 2-cyano-3,3-diphenylacrylate | 6197-30-4 |
| 20 | Menthyl o-aminobenzoate or: | 134-09-8 |
| | 5-methyl-2-(1-methylethyl) 2-aminobenzoate | |
| 21 | Glyceryl p-aminobenzoate or: | 136-44-7 |
| | 1-glyceryl 4-aminobenzoate | |
| 22 | 2,2′-Dihydroxy-4-methoxybenzophenone (dioxybenzone) | 131-53-3 |
| 23 | 2-Hydroxy-4-methoxy-4-methylbenzophenone | 1641-17-4 |
| | (mexenone) | |
| 24 | Triethanolamine salicylate | 2174-16-5 |
| 25 | Dimethoxyphenylglyoxalic acid or: | 4732-70-1 |
| | 3,4-dimethoxyphenylglyoxal acidic sodium | |
| 26 | 3-(4′-Sulfobenzylidene)bornan-2-one and its salts | 56039-58-8 |
| 27 | 4-tert-Butyl-4′-methoxydibenzoylmethane | 70356-09-1 |
| 28 | 2,2′,4,4′-Tetrahydroxybenzophenone | 131-55-5 |
| 29 | 2,2′-Methylenebis[6-(2H-benzotriazol-2-yl)-4-(1,1,3,3,- | 103597-45-1 |
| | tetramethylbutyl)phenol] | |
| 30 | 2,2′-(1,4-Phenylene)bis-1H-benzimidazole-4,6- | 180898-37-7 |
| | disulfonic acid, Na salt | |
| 31 | 2,4-bis[4-(2-Ethylhexyloxy)-2-hydroxy]phenyl- | 187393-00-6 |
| | 6-(4-methoxyphenyl)-(1,3,5)-triazine | |
| 32 | 3-(4-Methylbenzylidene)camphor | 36861-47-9 |
| 33 | Polyethoxyethyl 4-bis(polyethoxy)paraaminobenzoate | 113010-52-9 |
| 34 | 2,4-Dihydroxybenzophenone | 131-56-6 |
| 35 | 2,2′-Dihydroxy-4,4′-dimethoxybenzophenone-5,5′- | 3121-60-6 |
| | disodium sulfonate | |
| 36 | Benzoic acid, 2-[4-(diethylamino)-2-hydroxybenzoyl], hexyl ester | 302776-68-7 |
| 37 | 2-(2H-Benzotriazol-2-yl)-4-methyl-6-[2-methyl-3-[1,3,3,3-tetramethyl-1- | 155633-54-8 |
| | [(trimethylsilyl)oxy]disiloxanyl]propyl]phenol | |
| 38 | 1,1-[(2,2′-Dimethylpropoxy)carbonyl]-4,4-diphenyl-1,3-butadiene | 363602-15-7 |

[0292] Besides the two abovementioned groups of primary photoprotective substances, it is also possible to use secondary photoprotective agents of the antioxidant type which interrupt the photochemical reaction chain which is triggered when UV radiation penetrates into the skin. Typical examples thereof are superoxide dismutase, catalase, tocopherols (vitamin E) and ascorbic acid (vitamin C).

[0293] A further group are antiirritants which have an antiinflammatory effect on skin damaged by UV light. Such substances are, for example, bisabolol, phytol and phytantriol.

[0294] Likewise in accordance with the invention is the use of the keratin-binding effector molecules according to the invention and/or produced according to the inventive method in combination with inorganic pigments which stop UV rays in dermocosmetic preparations. Preference is given to pigments based on metal oxides and/or other metal compounds which are insoluble or sparingly soluble in water and chosen from the group of oxides of zinc (ZnO), titanium (TiO₂), iron (e.g. Fe₂O₃,), zirconium (ZrO₂), silicon (SiO₂), manganese (e.g. MnO), aluminum (Al₂O₃), cerium (e.g. Ce₂O₃), mixed oxides of the corresponding metals and mixtures of such oxides.

[0295] The inorganic pigments can be present here in coated form, i.e. are treated superficially. This surface treatment can consist, for example, in providing the pigments with a thin hydrophobic layer by a method known per se, as described in DE-A-33 14 742.

[0296] Suitable repellent active ingredients are compounds which are able to repel or drive away certain animals, in particular insects, from humans. These include, for example, 2-ethyl-1,3-hexanediol, N,N-diethyl-m-toluamide etc. Suitable hyperemic substances, which stimulate the flow of blood through the skin, are e.g. essential oils, such as dwarf pine extract, lavender extract, rosemary extract, juniperberry extract, horsechest nut extract, birch leaf extract, hayflower extract, ethyl acetate, camphor, menthol, peppermint oil, eucalyptus oil, etc. Suitable keratolytic and keratoplastic substances are, for example, salicylic acid, calcium thioglycolate, thioglycolic acid and its salts, sulfur, etc. Suitable antidandruff active ingredients are, for example, sulfur, sulfur polyethylene glycol sorbitan monooleate, sulfur ricinol polyethoxylate, zinc pyrithione, aluminum pyrithione, etc. Suitable antiphlogistics, which counteract skin irritations, are, for example, allantoin, bisabolol, dragosantol, camomile extract, panthenol, etc.

[0297] The use of the keratin-binding effector molecules according to the invention and/or produced according to the inventive method in combination with at least one cosmetically or pharmaceutically acceptable polymer is likewise in accordance with the invention.

[0298] Suitable polymers are, for example, cationic polymers with the INCI name Polyquaternium, e.g. copolymers of vinylpyrrolidone/N-vinylimidazolium salts (Luviquat FC, Luviquat HM, Luviquat MS, Luviquat), copolymers of N-vinylpyrrolidone/dimethylaminoethyl methacrylate, quaternized with diethyl sulfate (Luviquat PQ 11), copolymers of N-vinylcaprolactam/N-vinylpyrrolidone/N-vinylimidazolium salts (Luviquat E Hold), cationic cellulose derivatives (Polyquaternium-4 and -10), acrylamide copolymers (Polyquaternium-7) and chitosan.

[0299] Suitable cationic (quaternized) polymers are also Merquat (polymer based on dimethyldiallylammonium chloride), Gafquat (quaternary polymers which are formed by reacting polyvinylpyrrolidone with quaternary ammonium compounds), polymer JR (hydroxyethylcellulose with cationic groups) and plant-based cationic polymers, e.g. guar polymers, such as the Jaguar grades from Rhodia.

[0300] Further suitable polymers are also neutral polymers, such as polyvinylpyrrolidones, copolymers of N-vinylpyrrolidone and vinyl acetate and/or vinyl propionate, polysiloxanes, polyvinylcaprolactam and other copolymers with N-vinylpyrrolidone, polyethyleneimines and salts thereof, polyvinylamines and salts thereof, cellulose derivatives, polyaspartic acid salts and derivatives. These include, for example Luviflex 0 Swing (partially hydrolyzed copolymer of polyvinyl acetate and polyethylene glycol, BASF Aktiengesellschaft).

[0301] Suitable polymers are also nonionic, water-soluble or water-dispersible polymers or oligomers, such as polyvinylcaprolactam, e.g. Luviskol 0 Plus (BASF), or polyvinylpyrrolidone and copolymers thereof, in particular with vinyl esters, such as vinyl acetate, e.g. Luviskol 0 VA 37 (BASF), polyamides, e.g. based on itaconic acid and aliphatic diamines, as are described, for example, in DE-A43 33 238.

[0302] Suitable polymers are also amphoteric or zwitterionic polymers, such as the octylacrylamide/methyl methacrylate/tert-butylaminoethyl methacrylate-hydroxypropyl methacrylate copolymers obtainable under the names Amphomer (National Starch), and zwitterionic polymers, as are disclosed, for example, in the German patent applications DE39 29 973, DE 21 50 557, DE28 17 369 and DE 3708 451. Acrylamidopropyltrimethylammonium chloride/acrylic acid or methacrylic acid copolymers and alkali metal and ammonium salts thereof are preferred zwitterionic polymers. Further suitable zwitterionic polymers are methacroylethylbetaine/methacrylate copolymers, which are commercially available under the name Amersette (AMERCHOL), and copolymers of hydroxyethyl methacrylate, methyl methacrylate, N,N-dimethylaminoethyl methacrylate and acrylic acid (Jordapon (D)).

[0303] Suitable polymers are also nonionic, siloxane-containing, water-soluble or -dispersible polymers, e.g. polyether siloxanes, such as Tegopren 0 (Goldschmidt) or Besi&commat (Wacker).

[0304] Likewise in accordance with the invention is the use of the keratin-binding effector molecules according to the invention and/or produced according to the inventive method in combination with dermocosmetic active ingredients (one or more compounds) advantageously chosen from the group consisting of acetylsalicylic acid, atropine, azulene, hydrocortisone and derivatives thereof, e.g. hydrocortisone-17-valerate, vitamins of the B and D series, in particular vitamin B₁, vitamin B₁₂, vitamin D, vitamin A or derivatives thereof, such as retinyl palmitate, vitamin E or derivatives thereof such as, for example, tocopheryl acetate, vitamin C and deriatives thereof, such as, for example, ascorbyl glucoside, but also niacinamide, panthenol, bisabolol, polydocanol, unsaturated fatty acids, such as, for example, the essential fatty acids (usually referred to as vitamin F), in particular □-linolenic acid, oleic acid, eicosapentaenoic acid, docosahexaenoic acid and derivatives thereof, chloramphenicol, caffeine, prostaglandins, thymol, camphor, squalene, extracts or other products of vegetable and animal origin, e.g. evening primrose oil, borage oil or carob seed oil, fish oils, cod-liver oil or ceramides and ceramide-like compounds, incense extract, green tea extract, water lily extract, licorice extract, hamamelis, antidandruff active ingredients (e.g. selenium disulfide, zinc pyrithione, piroctone olamine, climbazole, octopirox, polydocanol and combinations thereof), complex active ingredients, such as, for example, those of □-oryzanoland calcium salts, such as calcium pantothenate, calcium chloride, calcium acetate. It is also advantageous to choose the active ingredients from the group of refatting substances, for example purcellin oil, Eucerit® and Neocerit®. The active ingredient or active ingredients are also particularly advantageously chosen from the group of NO synthesis inhibitors, particularly if the preparations according to the invention are to be used for the treatment and prophylaxis of the symptoms of intrinsic and/or extrinsic skin aging, and for the treatment and prophylaxis of the harmful effects of ultraviolet radiation on the skin and the hair. A preferred NO synthesis inhibitor is nitroarginine. The active ingredient or active ingredients are further advantageously chosen from the group comprising catechins and bile acid esters of catechins and aqueous or organic extracts from plants or parts of plants which have a content of catechins or bile acid esters of catechins, such as, for example, the leaves of the Theaceae plant family, in particular of the species Camellia sinensis (green tea). Their typical ingredients (e.g. polyphenols or catechins, caffeine, vitamins, sugars, minerals, amino acids, lipids) are particularly advantageous. Catechins are a group of compounds which are to be understood as hydrogenated flavones or anthocyanidins and represent derivatives of “catechin” (catechol, 3,3′,4′,5,7-flavanpentaol, 2-(3,4-dihydroxyphenyl)chroman-3,5,7-triol). Epicatechin ((2R,3R)-3,3′,4′,5,7-flavanpentaol) is an advantageous active ingredient for the purposes of the present invention. Also advantageous are plant extracts with a content of catechins, in particular extracts of green tea, such as, for example, extracts from leaves of the plants of the species Camellia spec., very particularly the tea types Camellia sinenis, C. assamica, C. taliensis and C. inawadiensis and hybrids of these with, for example, Camellia japonica. Preferred active ingredients are also polyphenols and catechins from the group (−)-catechin, (+)-catechin, (−)-catechin gallate, (−)-gallocatechin gallate, (+)-epicatechin, (−)-epicatechin, (−)-epicatechin gallate, (−)-epigallocatechin, (−)-epigallocatechin gallate.

[0305] Flavone and its derivatives (often also collectively called “flavones”) are advantageous active ingredients for the purposes of the present invention. They are characterized by the following basic structure (substitution positions given):

[chemical structure]

[0306] Some of the more important flavones, which can also preferably be used in preparations according to the invention are listed in Table 6 below.

TABLE 6
Flavones

| | OH substitution positions | | | | | | | |
|---|---|---|---|---|---|---|---|---|
| | 3 | 5 | 7 | 8 | 2′ | 3′ | 4′ | 5′ |
| Flavone | − | − | − | − | − | − | − | − |
| Flavonol | + | − | − | − | − | − | − | − |
| Chrysin | − | + | + | − | − | − | − | − |
| Galangin | + | + | + | − | − | − | − | − |
| Apigenin | − | + | + | − | − | − | + | − |
| Fisetin | + | − | + | − | − | + | + | − |
| Luteolin | − | + | + | − | − | + | + | − |
| Kaempferol | + | + | + | − | − | − | + | − |
| Quercetin | + | + | + | − | − | + | + | − |
| Morin | + | + | + | − | + | − | + | − |
| Robinetin | + | − | + | − | − | + | + | + |
| Gossypetin | + | + | + | + | − | + | + | − |
| Myricetin | + | + | + | − | − | + | + | + |

[0307] Flavones usually occur in nature in glycosylated form.

[0308] According to the invention, the flavonoids are preferably chosen from the group of substances of the general formula

[chemical structure]

where Z₁ to Z₇, independently of one another, are chosen from the group H, OH, alkoxy and hydroxyalkoxy groups, where the alkoxy or hydroxyalkoxy groups may be branched or unbranched and have 1 to 18 carbon atoms, and where Gly is chosen from the group of mono- and oligoglycoside radicals.

[0309] Furthermore, the active ingredients (one or more compounds) can also very advantageously be chosen from the group of hydrophilic active ingredients, in particular from the following group:

□-hydroxy acids, such as lactic acid or salicylic acid or salts thereof, such as, for example, Na lactate, Ca lactate, TEA lactate, urea, allantoin, serine, sorbitol, glycerol, milk proteins, panthenol, chitosan.

[0310] The amount of such active ingredients (one or more compounds) in the preparations according to the invention is preferably 0.001 to 30% by weight, particularly preferably 0.05 to 20% by weight, in particular 1 to 10% by weight, based on the total weight of the preparation. The specified active ingredients and further active ingredients which can be used in the preparations according to the invention are given in DE 103 18 526 A1 on pages 12 to 17, to the entire scope of which reference is made at this point.

[0311] In addition, the present invention relates to the use of the abovementioned preparations for preventing undesired changes in the appearance of the skin, such as, for example acne or greasy skin, keratoses, rosaceae, photosensitive, inflammatory, erythematous, allergic or autoimmune-reactive reactions.

[0312] For use, the cosmetic preparations according to the invention are applied to the skin, hair, fingernails or toenails in the manner customary for cosmetics or dermocosmetics.

[0313] The present invention further provides dermocosmetics comprising one of the above-described keratin-binding effector proteins, particularly preferably keratin-binding effector proteins chosen from the group consisting of enzymes, antibodies, effector-binding proteins, fluorescent proteins, antimicrobial peptides and self-assembling proteins. Particular preference is given to dermocosmetics comprising a keratin-binding effector molecule as described in Example 3.

[0314] Most preferred of all are dermocosmetics comprising keratin-binding effector proteins which comprise at least one keratin-binding polypeptide (ii) according to the sequences shown in SEQ ID No.: 2, 4, 6, 8, 10, 12, 14, 16, 18, 20, 22, 24, 26, 28, 30, 32, 34, 36, 38, 40, 42, 44, 46, 48, 50, 52, 54, 56, 58, 60, 62, 64, 66, 68, 70, 72, 74, 76, 78, 80, 82, 84, 86, 88, 90, 92, 94, 96, 98, 100, 102, 104, 106, 108, 110, 112, 114, 116, 118, 120, 122, 124, 126, 128, 130, 132, 134, 136, 138, 140, 146, 150, 153, 156, 157, 158, 160, 162, 164 or 166, preferably in SEQ ID No: 2, 4, 6, 8, 10, 12, 14, 40, 42, 44, 46, 48, 146, 150, 153, 156, 157, 158, 160, 162, 164, 166, 213 or 215, and the effector polypeptide (ii) is a silk protein, preferably one of the in the sequences SEQ ID No.: 151, 201, 202, 203, 204, 205, 206, 207, 208, 209 or 210, particularly preferably the C16 spider silk protein, which is a 16-fold repetition of the C modulus of the protein ADF4 from Araneus diadematus.

[0315] In a preferred embodiment of the present invention, the dermocosmetics, preferably skin- and hair-treatment compositions comprise a keratin-binding effector protein according to the invention in a concentration of from 0.001 to 1 percent by weight (% by wt.), preferably 0.01 to 0.9% by weight, particularly preferably 0.01 to 0.8% by weight or 0.01 to 0.7% by weight, very particularly preferably 0.01 to 0.6% by weight or 0.01 to 0.5% by weight most preferably 0.01 to 0.4% by weight or 0.01 to 0.3% by weight, based on the total weight of the composition. In a further embodiment, the compositions comprise a keratin-binding effector protein according to the invention in a concentration of from 1 to 10% by weight, preferably 2 to 8% by weight, 3 to 7% by weight, 4 to 6% by weight, based on the total weight of the composition. In a likewise preferred embodiment, the compositions comprise a keratin-binding effector protein according to the invention in a concentration of from 10 to 20% by weight, preferably 11 to 19% by weight, 12 to 18% by weight, 13 to 17% by weight, 14 to 16% by weight, based on the total weight of the composition. In a moreover preferred embodiment, the compositions comprise a keratin-binding effector protein according to the invention in a concentration of from 20 to 30% by weight preferably 21 to 29% by weight, 22 to 28% by weight, 23 to 27% by weight, 24 to 26% by weight, based on the total weight of the composition.

[0316] The compositions according to the invention are preferably skin protection compositions, skincare compositions, skin cleansing compositions, hair protection compositions, haircare compositions, hair cleansing compositions, hair colorants, mouthwashes and mouth rinses, or preparation for decorative cosmetics, which are preferably applied in the form of ointments, creams, emulsions, suspensions, lotions, milk, pastes, gels, foams or sprays, depending on the field of application.

[0317] Besides the keratin-binding effector proteins, the dermocosmetics according to the invention can comprise all of the polymers, pigments, humectants, oils, waxes, enzymes, minerals, vitamins, sunscreens, dyes, fragrances, antioxidants, preservatives and/or pharmaceutical active ingredients which have already been listed above.

[0318] Additionally, the following applies for the dermocosmetics according to the invention:

[0319] The formulation base of compositions according to the invention preferably comprises cosmetically or dermocosmetically/pharmaceutically acceptable auxiliaries. Pharmaceutically acceptable auxiliaries are the auxiliaries which are known for use in the field of pharmacy, food technology and related fields, in particular the auxiliaries listed in the relevant pharmacopoeia (e.g. DAB Ph. Eur. BP NF), and other auxiliaries whose properties do not preclude a physiological application.

[0320] Suitable auxiliaries may be: glidants, wetting agents, emulsifying and suspending agents, preservatives, antioxidants, antiirritatives, chelating agents, emulsion stabilizers, film formers, gel formers, odor masking agents, resins, hydrocolloids, solvents, solubility promoters, neutralizing agents, permeation accelerators, pigments, quaternary ammonium compounds, refatting and superfatting agents, ointment, cream or oil base substances, silicone derivatives, stabilizers, sterilizing agents, propellants, drying agents, opacifiers, thickeners, waxes, softeners, white oil. An embodiment in this regard is based on specialist knowledge, as shown, for example, in Fiedler, H. P. Lexikon der Hilfsstoffe für Pharmazie, Kosmetik und angrenzende Gebiete [Lexicon of auxiliaries for pharmacy, cosmetics and related fields], 4th edition, Aulendorf: ECV-Editio-Kantor-Verlag, 1996.

[0321] To produce the dermocosmetic compositions according to the invention, the active ingredients can be mixed or diluted with a suitable auxiliary (excipient). Excipients may be solid, semisolid or liquid materials which can serve as vehicles, carriers or medium for the active ingredient. The admixing of further auxiliaries takes place, if desired, in the manner known to the person skilled in the art. In addition, the polymers and dispersions are suitable as auxiliaries in pharmacy, preferably as or in (a) coating composition(s) or binder(s) for solid drug forms. They can also be used in creams and as tablet coatings and tablet binders.

[0322] According to a further preferred embodiment, the compositions according to the invention are cosmetic compositions for the care and protection of the skin and hair, nailcare compositions or preparations for decorative cosmetics.

[0323] Suitable skin cosmetic compositions are, for example, face tonics, face masks, deodorants and other cosmetic lotions. Compositions for use in decorative cosmetics include, for example, concealing sticks, stage make-up, mascara and eye shadows, lipsticks, kohl pencils, eyeliners, blushers, powders and eyebrow pencils.

[0324] Furthermore, the keratin-binding effector molecules according to the invention and/or produced according to the inventive method are used in nose strips for pore cleansing, in antiacne compositions, repellents, shaving compositions, aftershave and preshave care compositions, aftersun care compositions, hair removal compositions, hair colorants, intimate care compositions, footcare compositions, and in baby care.

[0325] The skincare compositions according to the invention are, in particular, W/O or O/W skin creams, day creams and night creams, eye creams, face creams, antiwrinkle creams, sunscreen creams, moisturizing creams, bleaching creams, self-tanning creams, vitamin creams, skin lotions, care lotions and moisturizing lotions.

[0326] Skin cosmetic and dermatological compositions according to the invention can also comprise an active ingredient which decomposes free radicals as protection against oxidative processes and the associated aging processes or damage to skin and/or hair, besides the keratin-binding effector molecule according to the invention and/or produced according to the inventive method. These active ingredients are preferably the substances described in the patent applications WO/0207698 and WO/03059312, to the contents of which reference is hereby expressly made, preferably the boron-comprising compounds described therein, which can reduce peroxides or hydroperoxides to give the corresponding alcohols without the formation of free-radical subsequent states. In addition, sterically hindered amines according to the general formula 3 can be used for this purpose,

[chemical structure]

where the radical Z has the following meaning: H, C₁-C₂₂ alkyl group, preferably C₁-C₁₂ alkyl group, such as methyl, ethyl, propyl, isopropyl, butyl, isobutyl, sec-butyl, tert-butyl, pentyl, isopentyl, neopentyl, tert-pentyl, hexyl, heptyl, octyl, nonyl, decyl, undecyl, dodecyl, C₁-C₂₂-alkoxyl group, preferably C₁-C₁₂-alkoxyl group, such as alkoxy-methyl, alkoxy-ethyl, alkoxy-propyl, alkoxy-isopropyl, alkoxy-butyl, alkoxy-isobutyl, alkoxy-sec-butyl, alkoxy-tert-butyl, alkoxy-pentyl, alkoxy-isopentyl, alkoxy-neopentyl, alkoxy-tert-pentyl, alkoxy-hexyl, alkoxy-heptyl, alkoxy-octyl, alkoxy-nonyl, alkoxy-decyl, alkoxy-undecyl, alkoxy-dodecyl, C₆ to C₁₀-aryl group, such as phenyl and naphthyl, where the phenyl radical can be substituted by C₁ to C₄ alkyl radicals, C₆ to C₁₀—O-aryl group, which can be substituted by a C₁-C₂₂ alkyl or C₁-C₂₂-alkoxy group, preferably by a C₁-C₁₂ alkyl or C₁-C₁₂-alkoxy group as described above, and
the radicals R¹ to R⁶, independently of one another, have the following meaning: H, OH, O, C₁-C₂₂ alkyl group, preferably C₁-C₁₂ alkyl group, such as methyl, ethyl, propyl, isopropyl, butyl, isobutyl, sec-butyl, tert-butyl, pentyl, isopentyl, neopentyl, tert-pentyl, hexyl, heptyl, octyl, nonyl, decyl, undecyl, dodecyl, C₁-C₂₂ alkoxyl group, preferably C₁-C₁₂ alkoxyl group, such as alkoxy-methyl, alkoxyethyl, alkoxypropyl, alkoxyisopropyl, alkoxybutyl, alkoxyisobutyl, alkoxy-sec-butyl, alkoxy-tert-butyl, alkoxypentyl, alkoxyisopentyl, alkoxyneopentyl, alkoxy-tert-pentyl, alkoxyhexyl, alkoxyheptyl, alkoxyoctyl, alkoxynonyl, alkoxydecyl, alkoxyundecyl, alkoxy-dodecyl, C₆ to C₁₀ aryl group, such as phenyl and naphthyl, where the phenyl radical can be substituted by C₁ to C₄ alkyl radicals, C₆ to C₁₀ O-aryl group, which may be substituted by a C₁-C₂₂ alkyl or C₁-C₂₂ alkoxyl group, preferably by a C₁-C₁₂ alkyl or C₁-C₁₂ alkoxyl group, as described above.

[0327] Particular preference is given to the use of the sterically hindered amines 3-dodecyl-N-(2,2,6,6-tetramethyl-4-piperidinyl)succinimide, 3-dodecyl-N-(1,2,2,6,6-pentamethyl-4-piperidinyl)succinimide, 3-octyl-N-(2,2,6,6-tetramethyl-4-piperidinyl)succinimide, 3-octyl-N-(1,2,2,6,6-pentamethyl-4-piperidinyl)succinimide, 3-octenyl-N-(2,2,6,6-tetramethyl-4-piperidinyl)succinimide, 3-octenyl-N-(1,2,2,6,6-pentamethyl-4-piperidinyl)succinimide and/or Uvinul®5050H, in an amount of from 0.001 to 1 percent by weight (% by wt.) preferably 0.01 to 0.1% by weight, 0.1 to 1% by weight, based on the total weight of the composition.

[0328] Besides the abovementioned compounds according to the invention and suitable carriers, the skin cosmetic preparations can also comprise further active ingredients and auxiliaries customary in skin cosmetics, as described above. These include, preferably, emulsifiers, preservatives, perfume oils, cosmetic active ingredients, such as phytantriol, vitamin A, E and C, retinol, bisabolol, panthenol, photoprotective agents, bleaches, colorants, tinting agents, tanning agents, collagen, protein hydrolyzates, stabilizers, pH regulators, dyes, salts, thickeners, gel formers, consistency regulators, silicones, humectants, refatting agents and/or further customary additives.

[0329] Preferred oil and fat components of the skin cosmetic and dermocosmetic compositions are the abovementioned mineral and synthetic oils, such as, for example, paraffins, silicone oils and aliphatic hydrocarbons having more than 8 carbon atoms, animal and vegetable oils, such as, for example, sunflower oil, coconut oil, avocado oil, olive oil, lanolin, or waxes, fatty acids, fatty acid esters, such as, for example, triglycerides of C6-C30 fatty acids, wax esters, such as, for example, jojoba oil, fatty alcohols, vaseline, hydrogenated lanolin and acetylated lanolin, and mixtures thereof.

[0330] To establish certain properties, such as, for example, improving the feel to the touch, the spreading behavior, the water resistance and/or the binding of active ingredients and auxiliaries such as pigments, the skin cosmetic and dermocosmetic preparations can additionally also comprise conditioning substances based on silicone compounds.

[0331] Suitable silicone compounds are, for example, polyalkylsiloxanes, polyarylsiloxanes, polyarylalkylsiioxanes, polyether siloxanes or silicone resins.

[0332] The cosmetic or dermocosmetic preparations are produced by customary methods known to the person skilled in the art.

[0333] Preferably, the cosmetic and dermocosmetic compositions are present in the form of emulsions, in particular as water-in-oil (W/O) or oil-in-water (O/W) emulsions.

[0334] However, it is also possible to choose other types of formulation, for example gels, oils, oleogels, multiple emulsions, for example in the form of W/O/W or O/W/O emulsions, anhydrous ointments or ointment bases, etc. Emulsifier-free formulations, such as hydrodispersions, hydrogels or a Pickering emulsion are also advantageous embodiments.

[0335] Emulsions are produced by known methods. Besides at least one keratin-binding effector molecule, the emulsions usually comprise customary constituents, such as fatty alcohols, fatty acid esters and, in particular, fatty acid triglycerides, fatty acids, lanolin and derivatives thereof, natural or synthetic oils or waxes and emulsifiers in the presence of water. The choice of additives specific to the type of emulsion and the production of suitable emulsions is described, for example, in Schrader, Grundlagen und Rezepturen der Kosmetika [Fundamentals and formulations of cosmetics], Hüthig Buch Verlag, Heidelberg, 2nd edition, 1989, third part, or Umbach, Kosmetik: Entwickfung, Herstellung und Anwendung kosmetischer Mittel [Cosmetics: development, manufacture and use of cosmetic compositions], 2nd expanded edition, 1995, Georg Thieme Verlag, ISBN 3 13 712602 9, pages 122 ff., to which reference is hereby expressly made.

[0336] A suitable emulsion in the form of a W/O emulsion, e.g. for a skin cream etc., generally comprises an aqueous phase which is emulsified in an oil or fatty phase using a suitable emulsifier system. A polyelectrolyte complex can be used for the provision of the aqueous phase.

[0337] Preferred fatty components which may be present in the fatty phase of the emulsions are: hydrocarbon oils, such as paraffin oil, purcellin oil, perhydrosqualene and solutions of microcrystalline waxes in these oils; animal or vegetable oils, such as sweet almond oil, avocado oil, calophylum oil, lanolin and derivatives thereof, castor oil, sesame oil, olive oil, jojoba oil, karite oil, hoplostethus oil, mineral oils whose distillation start-point under atmospheric pressure is at about 250° C. and whose distillation end-point is at 410° C., such as, for example, Vaseline oil, esters of saturated or unsaturated fatty acids, such as alkyl myristates, e.g., isopropyl myristate, butyl myristate or cetyl myristate, hexadecyl stearate, ethyl or isopropyl palmitate, octanoic or decanoic acid triglycerides and cetyl ricinoleate.

[0338] The fatty phase can also comprise silicone oils which are soluble in other oils, such as dimethylpolysiloxane, methylphenylpolysiloxane and the silicone glycol copolymer, fatty acids and fatty alcohols.

[0339] Besides the above-described compounds according to the invention, the skin care compositions can also comprise waxes, such as, for example, carnauba wax, candelilia wax, beeswax, microcrystalline wax, ozokerite wax and Ca, Mg and Al creates, myristates, linoieates and stearates.

[0340] In addition, an emulsion according to the invention may be in the form of an O/w emulsion. Such an emulsion usually comprises an oil phase, emulsifiers which stabilize the oil phase in the water phase, and an aqueous phase, which is usually present in thickened form. Suitable emulsifiers are preferably O/w emulsifiers, such as polyglycerol esters, sorbitan esters or partially esterified glycerides.

[0341] According to a further preferred embodiment the compositions according to the invention are a photoprotective composition, a shower gel, a shampoo formulation or a bath preparation, with photoprotective preparations being particularly preferred.

[0342] Such formulations comprise at least one keratin-binding effector molecule according to the invention and/or produced according to the inventive method, and usually anionic surfactants as base surfactants and amphoteric and/or nonionic surfactants as cosurfactants. Further suitable active ingredients and/or auxiliaries are generally chosen from lipids, perfume oils, dyes, organic acids, preservatives and antioxidants, and thickeners/gel formers, skin conditioning agents and humectants.

[0343] These formulations advantageously comprise 2 to 50% by weight, preferably 5 to 40% by weight particularly preferably 8 to 30% by weight, of surfactants, based on the total weight of the formulation.

[0344] In the washing, shower and bath preparations, all of the anionic, neutral, amphoteric or cationic surfactants customarily used in body-cleansing compositions can be used.

[0345] Suitable anionic surfactants are, for example, alkyl sulfates, alkyl ether sulfates, alkylsulfonates, alkylarylsulfonates, alkyl succinates, alkyl sulfosuccinates, N-alkoyl sarcosinates, acyl taurates, acyl isothionates, alkyl phosphates, alkyl ether phosphates, alkyl ether carboxylates, alpha-olefinsulfonates, in particular the alkali metal and alkaline earth metal salts, e.g. sodium, potassium, magnesium, calcium, and ammonium and triethanolamine salts. The alkyl ether sulfates, alkyl ether phosphates and alkyl ether carboxylates can have between 1 and 10 ethylene oxide or propylene oxide units, preferably 1 to 3 ethylene oxide units, in the molecule.

[0346] These include, for example, sodium lauryl sulfate, ammonium lauryl sulfate, sodium lauryl ether sulfate, ammonium lauryl ether sulfate, sodium lauryl sarcosinate, sodium oleyl succinate, ammonium lauryl sulfosuccinate, sodium dodecylbenzenesulfonate, triethanolamine dodecylbenzenesulfonate.

[0347] Suitable amphoteric surfactants are, for example, alkylbetaines, alkylamidopropylbetaines, alkylsulfobetaines, alkyl glycinates, alkyl carboxyglycinates, alkyl amphoacetates or -propionates, alkyl amphodiacetates or -dipropionates.

[0348] For example, cocodimethylsulfopropylbetaine, laurylbetaine, cocamidopropylbetaine or sodium cocamphopropionate can be used.

[0349] Suitable nonionic surfactants are, for example, the reaction products of aliphatic alcohols or alkylphenols having 6 to 20 carbon atoms in the alkyl chain, which may be linear or branched, with ethylene oxide and/or propylene oxide. The amount of alkylene oxide is about 6 to 60 mol per mole of alcohol. In addition, alkylamine oxides, mono- or dialkylalkanolamides, fatty acid esters of polyethylene glycols, ethoxylated fatty acid amides, alkyl polyglycosides or sorbitan ether esters are suitable.

[0350] Furthermore, the washing, shower and bath preparations can comprise customary cationic surfactants, such as, for example, quaternary ammonium compounds, for example cetyltrimethylammonium chloride.

[0351] In addition, the shower gel/shampoo formulations can comprise thickeners, such as, for example, sodium chloride, PEG-55, propylene glycol oleate, PEG-120 methylglucose dioleate and others, and also preservatives, further active ingredients and auxiliaries and water.

### Hair Treatment Compositions

[0352] According to a further preferred embodiment, the dermocosmetics according to the invention are hair treatment compositions.

[0353] Preferably, the hair treatment compositions according to the invention are in the form of a setting foam, hair mousse, hair gel, shampoo, hair spray, hair foam, end fluid, neutralizer for permanent waves, hair colorant and bleach or hot-oil treatment. Depending on the field of use, the hair cosmetic preparations can be applied as (aerosol) spray, (aerosol) foam, gel, gel spray, cream, lotion or wax. Hair sprays include here both aerosol sprays and also pump sprays without propellant gas. Hair foams include both aerosol foams and also pump foams without propellant gas. Hair sprays and hair foams preferably include predominantly or exclusively water-soluble or water-dispersible components. If the compounds used in the hair sprays and hair foams according to the invention are dispersible in water, they can be applied in the form of aqueous microdispersions with particle diameters of usually 1 to 350 nm, preferably 1 to 250 nm. The solids contents of these preparations are here usually in a range from about 0.5 to 20% by weight. These microdispersions do not usually require emulsifiers or surfactants for their stabilization.

[0354] Further constituents are to be understood as meaning the additives customary in cosmetics, for example propellants, antifoams, interface-active compounds, i.e. surfactants, emulsifiers, foam formers and solubilizers. The interface-active compounds used may be anionic, cationic, amphoteric or neutral. Further customary constituents may also be, for example, preservatives, perfume oils, opacifiers, active ingredients, UV filters, care substances, such as panthenol, collagen, vitamins, protein hydrolyzates, alpha- and beta-hydroxycarboxylic acids, stabilizers, pH regulators, dyes, viscosity regulators, gel formers, salts, humectants, refafting agents, complexing agents and further customary additives.

[0355] Also included here are all styling and conditioner polymers known in cosmetics which can be used in combination with the keratin-binding effector molecules according to the invention if quite specific properties are to be established.

[0356] Suitable conventional hair cosmetics polymers are, for example, the abovementioned cationic, anionic, neutral, nonionic and amphoteric polymers, to which reference is made here.

[0357] To establish certain properties, the preparations can additionally also comprise conditioning substances based on silicone compounds. Suitable silicone compounds are, for example, polyalkylsiloxanes, polyarylsiloxanes, polyarylalkylsiloxanes, polyether siloxanes, silicone resins or dimethicone copolyols (CTFA) and amino functional silicone compounds, such as amodimethicones (CTFA).

[0358] Propellants are the propellants customarily used for hair sprays or aerosol foams. Preference is given to mixtures of propane/butane, pentane, dimethyl ether, 1,1-difluoroethane (HFC-152 a), carbon dioxide, nitrogen or compressed air.

[0359] Emulsifiers which can be used are all emulsifiers customarily used in hair foams. Suitable emulsifiers may be nonionic, cationic or anionic or amphoteric. Examples of nonionic emulsifiers (INCI nomenclature) are laureths, e.g. laureth-4; ceteths, e.g. ceteth-1, polyethylene glycol cetyl ether, ceteareths, e.g. ceteareth-25, polyglycol fatty acid glycerides, hydroxylated lecithin, lactyl esters of fatty acids, alkyl polyglycosides.

[0360] Examples of cationic emulsifiers are cetyidimethyl-2-hydroxyethylammonium dihydrogenphosphate, cetyltrimonium chloride, cetyltrimonium bromide, cocotrimonium methyl sulfate, quaternium-1 to x (INCI).

[0361] Anionic emulsifiers can be chosen, for example, from the group of alkyl sulfates, alkyl ether sulfates, alkylsulfonates, alkylarylsulfonates, alkyl succinates, alkyl sulfosuccinates, N-alkoyl sarcosinates, acyl taurates, acyl isethionates, alkyl phosphates, alkyl ether phosphates, alkyl ether carboxylates, alpha-olefinsulfonates, in particular the alkali metal and alkaline earth metal salts, e.g. sodium, potassium, magnesium, calcium, and ammonium and triethanolamine salts. The alkyl ether sulfates, alkyl ether phosphates and alkyl ether carboxylates can have between 1 and 10 ethylene oxide or propylene oxide units, preferably 1 to 3 ethylene oxide units, in the molecule.

[0362] Gel formers which can be used are all gel formers customary in cosmetics. These include slightly crosslinked polyacrylic acid, for example Carbomer (INCI), cellulose derivatives, e.g. hydroxypropylcellulose, hydroxyethylcellulose, cationically modified celluloses, polysaccharides, e.g. xanthan gum, caprylicicapric triglyceride, sodium acrylate copolymers, polyquaternium-32 (and) paraffinum liquidum (INCI), sodium acrylate copolymers (and) paraffinum liquidum (and) PPG-1 trideceth-6, acrylamidopropyltrimonium chloride/acrylamide copolymers, steareth-10 alkyl ether, acrylate copolymers, polyquaternium-37 (and) paraffinum liquidum (and) PPG-1 trideceth-6, polyquaternium 37 (and) propylene glycol dicaprate dicaprylate (and) PPG-1 trideceth-6, polyquaternium-7, polyquaternium-44.

[0363] In the shampoo formulations, all of the anionic, neutral, amphoteric or cationic surfactants customarily used in shampoos can be used.

[0364] Suitable anionic surfactants are, for example, alkyl sulfates, alkyl ether sulfates, alkylsulfonates, alkylarylsulfonates, alkyl succinates, alkyl sulfosuccinates, N-alkoyl sarcosinates, acyl taurates, acyl isothionates, alkyl phosphates, alkyl ether phosphates, alkyl ether carboxylates, alpha-olefinsulfonates, in particular the alkali metal and alkaline earth metal salts, e.g. sodium, potassium, magnesium, calcium, and ammonium and triethanolamine salts. The alkyl ether sulfates, alkyl ether phosphates and alkyl ether carboxylates can have between 1 and 10 ethylene oxide or propylene oxide units, preferably 1 to 3 ethylene oxide units, in the molecule.

[0365] Of suitability are, for example, sodium lauryl sulfate, ammonium lauryl sulfate, sodium lauryl ether sulfate, ammonium lauryl ether sulfate, sodium lauroyl sarcosinate, sodium oleyl succinate, ammonium lauryl sulfosuccinate, sodium dodecylbenzenesulfonate, triethanolamine dodecylbenzenesulfonate. Suitable amphoteric surfactants are, for example, alkylbetaines, alkylamidopropylbetaines, alkylsulfobetaines, alkyl glycinates, alkyl carboxyglycinates, alkyl amphoacetates or -propionates, alkyl amphodiacetates or -dipropionates.

[0366] For example, cocodimethylsulfopropylbetaine, laurylbetaine, cocamidopropylbetaine or sodium cocamphopropionate can be used.

[0367] Suitable nonionic surfactants are, for example, the reaction products of aliphatic alcohols or alkylphenols having 6 to 20 carbon atoms in the alkyl chain, which may be linear or branched, with ethylene oxide and/or propylene oxide. The amount of alkylene oxide is about 6 to 60 mol per mole of alcohol. In addition, alkylamine oxides, mono- or dialkylalkanolamides, fatty acid esters of polyethylene glycols, alkyl polyglycosides or sorbitan ether esters are suitable.

[0368] Furthermore, the shampoo formulations can comprise customary cationic surfactants, such as, for example, quaternary ammonium compounds, for example cetyltrimethylammonium chloride.

[0369] In the shampoo formulations, in order to achieve certain effects, customary conditioning agents can be used in combination with the keratin-binding effector molecules according to the invention.

[0370] These include, for example, the abovementioned cationic polymers with the INCI name Polyquaternium, in particular copolymers of vinylpyrrolidone/N-vinylimidazolium salts (Luviquat FC, HM, Luviquat MS, Luviquat Care), copolymers of N-vinylpyrrolidone/dimethylaminoethyl methacrylate, quaternized with diethyl sulfate (Luviquat D PQ 11), copolymers of N-vinylcaprolactam/N-vinylpyrrolidone/N-vinylimidazolium salts (Luviquat D Hold), cationic cellulose derivatives (Polyquaternium-4 and -10), acrylamide copolymers (Polyquaternium-7). In addition, protein hydrolyzates can be used, and also conditioning substances based on silicone compounds, for example polyalkylsiloxanes, polyarylsiloxanes, polyarylalkylsiloxanes, polyether siloxanes or silicone resins. Further suitable silicone compounds are dimethicone copolyols (CTFA) and amino-functional silicone compounds, such as amodimethicones (CTFA). In addition, cationic guar derivatives, such as guar Hydroxypropyltrimonium Chloride (INCI) can be used.

[0371] According to a further embodiment, this hair cosmetic or skin cosmetic preparation serves for the care or the protection of the skin or hair and is in the form of an emulsion, a dispersion, a suspension, an aqueous surfactant preparation, a milk, a lotion, a cream, a balsam, an ointment, a gel, a granulate, a powder, a stick preparation, such as, for example, a lipstick, a foam, an aerosol or a spray. Such formulations are highly suitable for topical preparations. Suitable emulsions are oil-in-water emulsions and water-in-oil emulsions or microemulsions.

[0372] As a rule, the hair cosmetic or skin cosmetic preparation is used for application to the skin (topical) or hair. Topical preparations are understood here as meaning those preparations which are suitable for applying the active ingredients to the skin in a fine distribution and preferably in a form which can be absorbed by the skin. Of suitability for this purpose are, for example, aqueous and aqueous-alcoholic solutions, sprays, foams, foam aerosols, ointments, aqueous gels, emulsions of the O/W or W/O type, microemulsions or cosmetic stick preparations.

[0373] According to a preferred embodiment of the cosmetic composition according to the invention, the composition comprises a carrier. A preferred carrier is water, a gas, a water-based liquid, an oil, a gel, an emulsion or microemulsion, a dispersion or a mixture thereof. The specified carriers exhibit good skin compatibility. Of particular advantage for topical preparations are aqueous gels, emulsions or microemulsions.

[0374] Emulsifiers which can be used are nonionogenic surfactants, zwitterionic surfactants, ampholytic surfactants or anionic emulsifiers. The emulsifiers may be present in the composition according to the invention in amounts of from 0.1 to 10% by weight, preferably 1 to 5% by weight, based on the composition.

[0375] The nonionogenic surfactant used may, for example, be a surfactant from at least one of the following groups:

addition products of from 2 to 30 mol of ethylene oxide and/or 0 to 5 mol of propylene oxide onto linear fatty alcohols having 8 to 22 carbon atoms, onto fatty acids having 12 to 22 carbon atoms and onto alkylphenols having 8 to 15 carbon atoms in the alkyl group;
C_{12/18}-fatty acid mono- and -diesters of addition products of from 1 to 30 mol of ethylene oxide onto glycerol; glycerol mono- and diesters and sorbitan mono- and diesters of saturated and unsaturated fatty acids having 6 to 22 carbon atoms and ethylene oxide addition products thereof; alkyl mono- and oligoglycosides having 8 to 22 carbon atoms in the alkyl radical and ethoxylated analogs thereof; addition products of from 15 to 60 mol of ethylene oxide onto castor oil and/or hydrogenated castor oil; polyol and, in particular polyglycerol esters, such as, for example, polyglycerol polyricinoleate, polyglycerol poly-12-hydroxystearate or polyglycerol dimerate. Likewise suitable are mixtures of compounds from two or more of these classes of substances;
addition products of from 2 to 15 mol of ethylene oxide onto castor oil and/or hydrogenated castor oil; partial esters based on linear, branched, unsaturated or saturated C_{6/22} fatty acids, ricinoleic acid, and 12-hydroxystearic acid and glycerol, polyglycerol, pentaerythritol, dipentaerythritol, sugar alcohols (e.g. sorbitol), alkyl glucosides (e.g. methyl glucoside, butyl glucoside, lauryl glucoside), and polyglucosides (e.g. cellulose); mono-, di- and trialkyl phosphates, and mono-, di- and/or tri-PEG alkyl phosphates and salts thereof;
wool wax alcohols;
polysiloxane-polyalkyl polyether copolymers and corresponding derivatives;
mixed esters of pentaerythritol, fatty acids, citric acid and fatty alcohol as in German patent specification 1165574 and/or mixed esters of fatty acids having 6 to 22 carbon atoms, methylglucose and polyols, preferably glycerol or polyglycerol, and polyalkylene glycols.

[0376] In addition, zwitterionic surfactants can be used as emulsifiers. Zwitterionic surfactants is the term used to refer to those surface-active compounds which carry at least one quaternary ammonium group and at least one carboxylate group or a sulfonate group in the molecule. Particularly suitable zwitterionic surfactants are the so-called betaines, such as the N-alkyl-N,N-dimethylammonium glycinates, for example cocoalkyldimethylammonium glycinate, N-acylaminopropyl-N,N-dimethylammonium glycinates, for example cocoacylaminopropyldimethylammonium glycinate, and 2-alkyl-3-carboxylmethyl-3-hydroxyethylimidazolines having in each case 8 to 18 carbon atoms in the alkyl or acyl group, and cocoacylaminoethylhydroxyethyl carboxymethylglycinate. Particular preference is given to the fatty acid amide derivative known under the CTFA name Cocamidopropyl Betaine.

[0377] Likewise suitable emulsifiers are ampholytic surfactants. Ampholytic surfactants are understood as meaning those surface-active compounds which, apart from a C_{8,18}-alkyl or -acyl group in the molecule, comprise at least one free amino group and at least one —COOH— or —SO₃H group, and are capable of forming internal salts. Examples of suitable ampholytic surfactants are N-alkylglycines, N-alkylpropionic acids, N-alkylaminobutyric acids, N-alkyliminodipropionic acids, N-hydroxyethyl-N-alkylamidopropylglycines, N-alkyltaurines, N-alkylsarcosines, 2-alkylaminopropionic acids and alkylaminoacetic acids having in each case about 8 to 18 carbon atoms in the alkyl group.

[0378] Particularly preferred ampholytic surfactants are N-cocoalkylaminopropionate, cocoacylaminoethylaminopropionate and C_{12/18}-acylsarcosine. Besides the ampholytic emulsifiers, quaternary emulsifiers are also suitable, with those of the ester quat type, preferably methyl-quaternized difatty acid triethanolamine ester salts, being particularly preferred. Furthermore, anionic emulsifiers which may be used are alkyl ether sulfates, monoglyceride sulfates, fatty acid sulfates, sulfosuccinates and/or ether carboxylic acids.

[0379] Suitable oil substances are Guerbet alcohols based on fatty alcohols having 6 to 18, preferably 8 to 10, carbon atoms, esters of linear C₆-C₂₂-fatty acids with linear C₆-C₂₂-fatty alcohols, esters of branched C₆-C₁₃-carboxylic acids with linear C₆-C₂₂-fatty alcohols, esters of linear C₆-C₂₂-fatty acids with branched alcohols, in particular 2-ethylhexanol, esters of linear and/or branched fatty acids with polyhydric alcohols (such as, for example, propylene glycol, dimerdiol or trimertriol) and/or Guerbet alcohols, triglycerides based on C₆-C₁₀-fatty acids, liquid mono-/di-, triglyceride mixtures based on C₆-C₁₈-fatty acids, esters of C₈-C₂₂-fatty alcohols and/or Guerbet alcohols with aromatic carboxylic acids, in particular benzoic acid, esters of C₂-C₁₂-dicarboxylic acids with linear or branched alcohols having 1 to 22 carbon atoms or polyols having 2 to 10 carbon atoms and 2 to 6 hydroxyl groups, vegetable oils, branched primary alcohols, substituted cyclohexanes, linear C₆-C₂₂-fatty alcohol carbonates, Guerbet carbonates, esters of benzoic acid with linear and/or branched C₆-C₂₂-alcohols (e.g. Finsolv® TN), dialkyl ethers, ring-opening products of epoxidized fatty acid esters with polyols, silicone oils and/or aliphatic or naphthenic hydrocarbons. Oil substances which may be used are also silicone compounds, for example dimethyl polysiloxanes, methylphenylpolysiloxanes, cyclic silicones, and amino-, fatty-acid-, alcohol-, polyether-, epoxy-, fluorine-, alkyl- and/or glycoside-modified silicone compounds, which may either be in the form of a liquid or in the form of a resin at room temperature. The oil substances may be present in the compositions according to the invention in amounts of from 1 to 90% by weight, preferably 5 to 80% by weight, and in particular 10 to 50% by weight, based on the composition.

[0380] The list of specified ingredients which can be used together with the keratin-binding effector molecules according to the invention and/or produced by the inventive method should of course not be regarded as being exhaustive or limiting. The ingredients can be used individually or in any combinations with one another.

[0381] The invention also provides the keratin-binding effector proteins shown in the sequences SEQ ID No.: 168, 176, 182, 188, 194 and 200.

[0382] The present invention likewise provides nucleic acid molecules according to the SEQ ID No.: 167, 175, 181, 187, 193 and 199 and nucleic acid molecules which code for polypeptides, comprising at least one polypeptide according to the sequences shown in SEQ ID No.: 168, 176, 182, 188, 194 and 200.

[0383] The present invention further provides DNA expression cassettes comprising at least one nucleic acid molecule with a nucleic acid sequence which encodes for a polypeptide, comprising at least one polypeptide which is encoded by a nucleic acid molecule according to the sequence shown in SEQ ID No.: 167, 175, 181, 187, 193 or 199. According to the invention, preference is given to DNA expression cassettes comprising a nucleic acid molecule with a nucleic acid sequence according to the sequence shown in SEQ ID No.: 167.

[0384] Preferably, such constructs according to the invention comprise a promoter 5′-upstream of the particular encoding sequence, and a terminator sequence 3′-downstream, and also, if appropriate, further customary regulatory elements, each operatively linked to the encoding sequence.

[0385] Regulatory elements include enhancers, targeting sequences, polyadenylation signals, selectable markers, amplification signals, replication origins and the like. Suitable regulatory sequences are described, for example, in Goeddel, Gene Expression Technology: Methods in Enzymology 185, Academic Press, San Diego, Calif. (1990).

[0386] In addition to these regulation sequences, the natural regulation of these sequences may also be present before the actual structure genes and, if appropriate, have been genetically modified such that the natural regulation has been switched off and the expression of the genes has been increased.

[0387] A preferred nucleic acid construct advantageously also comprises one or more of the “enhancer” sequences already mentioned, functionally linked to the promoter, which permit increased expression of the nucleic acid sequence. On the 3′-end of the DNA sequences it is also possible to insert additional advantageous sequences, such as further regulatory elements or terminators.

[0388] The nucleic acids according to the invention may be present in one or more copies within the construct. Within the construct, further markers, such as genes complementing antibiotic resistances or auxotrophs, if appropriate for selection on the construct, may also be present.

[0389] Advantageous regulation sequences for the method according to the invention are present, for example, in promoters such as cos, tac, trp, tet, trp-tet, Ipp, lac, Ipp, lacIq-T7, T5, T3, gal, trc, ara, rhaP(rhaPBAD) SP6, lambda-PR or imlambda-P promoter, which are advantageously used in Gram-negative bacteria. Further advantageous regulation sequences are present, for example, in the Gram-positive promoters amy and SP02, in the yeast or fungi promoters ADC1, MFalpha, AC, P-60, CYC1, GAPDH, TEF, rp28, ADH.

[0390] It is also possible to use artificial promoters for the regulation.

[0391] For expression in a host organism, the nucleic acid construct is advantageously inserted into a vector, such as, for example, a plasmid or a phage, which allows optimum expression of the genes in the host. Apart from plasmids and phages, vectors are also understood as meaning all other vectors known to the person skilled in the art, thus e.g. viruses, such as SV40, CMV, baculovirus and adenovirus, transposons, IS elements, phasmids, cosmids, and linear or circular DNA, and also the agrobacterium system.

[0392] The production of an expression cassette can be realized using customary recombinant and cloning techniques known to the person skilled in the art, as described, for example, in Maniatis T, Fritsch E F and Sambrook J (1989) Molecular Cloning: A Laboratory Manual, Cold Spring Harbor Laboratory, Cold Spring Harbor (NY), in Silhavy T J, Berman M L and Enquist L W (1984) Experiments with Gene Fusions, Cold Spring Harbor Laboratory, Cold Spring Harbor (NY), in Ausubel F M et al. (1987) Current Protocols in Molecular Biology, Greene Publishing Assoc. and Wiley Interscience. Between the two sequences it is, however, also possible to position further sequences which, for example, have the function of a linker with certain restriction enzyme restriction sites, of a signal peptide or of a protein anchor (e.g. His tag). The insertion of sequences can also lead to the expression of fusion proteins. Preferably, the expression cassette, consisting of a linkage of promoter and nucleic acid sequence to be expressed, can be present in integrated form in a vector and be inserted into the genome of a cell by, for example, transformation. The expression cassette inserted into a vector can also exist and be propagated extrachromosomally in a cell.

[0393] The nucleic acid sequences present in the expression cassettes or vectors according to the invention can be functionally linked with further genetic control sequences besides a promoter. The term genetic control sequences is to be understood in the wide sense and means all those sequences which have an effect on the coming into being or the function of the expression cassette according to the invention. Genetic control sequences modify, for example, the transcription and translation in prokaryotic or eukaryotic organisms. Preferably, the expression cassettes according to the invention comprise a promoter 5′-upstream of the particular nucleic acid sequence to be expressed transgenically, and a terminator sequence 3′-downstream as additional genetic control sequence, and, if appropriate, further customary regulatory elements, each functionally linked to the nucleic acid sequence to be expressed transgenically.

[0394] Genetic control sequences also comprise further promoters, promotor elements or minimal promoters which can modify the expression-controlling properties. In principle, it is possible to use all natural promoters with their regulation sequences which are able, in the preferred organisms, to control the gene expression of a nucleic acid molecule. Moreover, synthetic promoters can also be used advantageously.

[0395] In addition, genetic control sequences also comprise the 5′-untranslated regions, introns or noncoding 3′-region of genes. For example, it has been shown that 5′-untranslated sequences can enhance the transient expression of heterologous genes.

[0396] The expression cassette can advantageously comprise one or more so-called “enhancer sequences” functionally linked to the promoter, which permit increased transgenic expression of the nucleic acid sequence. Also on the 3′-end of the nucleic acid sequences to be expressed transgenically, additional advantageous sequences can be inserted, such as further regulatory elements or terminators. The nucleic acid sequences to be expressed transgenically can be present in the gene construct in one or more copies.

[0397] In addition, control sequences are to be understood as meaning those which allow homologous recombination and/or insertion into the genome of a host organism, or permit removal from the genome.

[0398] In the case of homologous recombination, for example, the natural promoter of a specific gene can be exchanged for a promoter with other properties.

[0399] An expression cassette and the vectors derived from it can comprise further functional elements. The term functional element is to be understood in the wide sense and means all those elements which have an effect on production, replication or function of the expression cassettes, vectors or transgenic organisms according to the invention. Mention may be made of the following nonlimiting examples:
[0400] a) Selection markers. To select successfully transformed cells it is usually necessary to additionally introduce a selectionable marker which imparts resistance to a biocide (for example a herbicide), a metabolism inhibitor, or an antiobiotic to the successfully transformed cells. The selection marker allows the selection of the transformed cells from untransformed ones and are to be chosen individually according to the desired host organisms and are known as such to the person skilled in the art. Selection markers impart, for example, resistance to a metabolism inhibitor, such as 2-deoxyglucose-6-phosphate (WO 98/45456), antibiotics or biocides, preferably herbicides, such as, for example, kanamycin, G 418, bleomycin, hygromycin or kanamycin etc. As selection marker preference is given to the aasa gene, which imparts resistance to the antibiotic apectinomycin, the streptomycin phosphotransferase (SPT) gene, which ensures resistance against streptomycin, the neomycin phosphotransferase (NPTII) gene, which imparts resistance against kanamycin or geneticidin, the hygromycin phosphotransferase (HPT) gene, which imparts resistance to hygromycin, the acetolactate synthase gene (ALS), which imparts resistance to sulfonylurea herbicides (e.g. mutated ALS variants with e.g. S4 and/or Hra mutation).
[0401] b) Reporter genes which code for readily quantifiable proteins or, via intrinsic color or enzyme activity, ensure evaluation of the transformation efficiency or of the expression site or time. Very particular preference is given here to reporter proteins (Schenborn E, Groskreutz D. Mol Biotechnol. 1999; 13(1):29-44) such as the “green fluorescence protein” (GFP) (Sheen et al.(1995) Plant Journal 8(5):777-784; Haseloff et al.(1997) Proc Natl Acad Sci USA 94(6):2122-2127; Reichel et al.(1996) Proc Natl Acad Sci USA93(12):5888-5893; Tian et al. (1997) Plant Cell Rep 16:267-271; WO 97/41228; Chui W L et al. (1996) Curr Biol 6:325-330; Leffel S M et al. (1997) Biotechniques. 23(5):912-8), the chloramphenicol transferase, a luciferase (Ow et al. (1986) Science 234:856-859; Millar et al. (1992) Plant Mol Biol Rep 10:324-414), the aequorin gene (Prasher et al. (1986) Biochem Biophys Res Commun 126(3):1259-1268), the β-galactosidase).
[0402] c) Replication origins which ensure replication of the expression cassettes or vectors according to the invention in, for example, E. coli. By way of example, mention may be made of ORI (origin of DNA replication), pBR322 ori or P15A ori (Sambrook et al.: Molecular Cloning. A Laboratory Manual, 2^{nd} ed. Cold Spring Harbor Laboratory Press, Cold Spring Harbor, N.Y., 1989).

[0403] The insertion of an expression cassette according to the invention into a cell or an organism can advantageously be realized using vectors in which the expression cassettes are present. The expression cassette can be inserted into the vector (for example a plasmid) via a suitable restriction site. The resulting plasmid is initially introduced into E. coli. Correctly transformed E. coli are selected, harvested and the recombinant plasmid is obtained using methods familiar to the person skilled in the art. Restriction analysis and sequencing can also serve to check the cloning step.

[0404] The present invention likewise provides vectors comprising an expression cassette comprising a nucleic acid molecule with a nucleic acid sequence according to the sequence shown in SEQ ID No.: 167, 175, 181, 187, 193 or 199.

[0405] For expression in a host organism, the nucleic acid construct is advantageously inserted into a vector, such as, for example, a plasmid or a phage which allows optimum expression of the genes in the host. Apart from plasmids and phages, vectors are also to be understood as meaning all other vectors known to the person skilled in the art, thus e.g. viruses, such as, SV40, CMV, baculovirus and adenovirus, transposons, IS elements, phasmids, cosmids, and linear or circular DNA, and also the agrobacterium system.

[0406] These vectors can be replicated autonomously in the host organism or be chromosomally replicated.

[0407] These vectors represent a further embodiment of the invention. Suitable plasmids are, for example, in E. coli pLG338, pQE30, pACYC184, pBR322, pUC18, pUC19, pKC30, pRep4, pHS1, pKK223-3, pDHE19.2, pHS2, pPLc236, pMBL24, pLG200, pUR290, pIN-III″3-B1, tgt11 or pBdCl, in Streptomyces pIJ101, pIJ364, pIJ702 or pIJ361, in Bacillus pUB110, pC194, pWH320, pMM1520, pMM1525 or pBD214, in Corynebacterium pSA77 or pAJ667, in fungi pALS1, pIL2 or pBB116, in yeasts 2alpha, pAG-1, YEp6, YEp13 or pEMBLYe23 or in plants pLGV23, pGHlac+, pBIN19, pAK2004 or pDH51. The specified plasmids represent a small selection of the possible plasmids. Further plasmids are known to the person skilled in the art and can be found, for example, in the book Cloning Vectors (Eds. Pouwels P. H, et al. Elsevier, Amsterdam-New York-Oxford, 1985, ISBN 0 444 904018).

[0408] Nucleic acid constructs according to the invention or the vectors comprising the nucleic acid molecules according to the invention can also advantageously be introduced into the microorganisms in the form of a linear DNA and be integrated into the genome of the host organism via heterologous or homologous recombination. This linear DNA can consist of a linearized vector such as a plasmid or only of the nucleic acid construct or the nucleic acid according to the invention.

[0409] For optimum expression of heterologous genes in organisms, it is advantageous to modify the nucleic acid sequences to correspond to the specific “codon usage” used in the organism. The “codon usage” can be determined easily using computer evaluations of other known genes of the organism in question (e.g. via: Codon usage tabulated from the international DNA sequence databases: status for the year 2000. Nakamura, Y., Gojobori, T. and Ikemura, T. (2000) Nucl. Acids Res. 28, 292., http://www.kazusa.or.jp/codon/index.html).

[0410] For expression in a suitable host organism, the recombinant nucleic acid construct or gene construct is advantageously inserted into a host-specific vector which permits optimum expression of the genes in the host. Vectors are well known to the person skilled in the art and can be found, for example, in “Cloning Vectors” (Pouwels P. H. et al., Ed., Elsevier, Amsterdam-New York-Oxford, 1985).

[0411] With the help of the vectors according to the invention, it is possible to prepare recombinant microorganisms which are, for example, transformed with at least one vector according to the invention and can be used for the production of the polypeptides according to the invention. The recombinant constructs according to the invention described above are advantageously inserted into a suitable host system and expressed. Here, preference is given to using customary cloning and transfection methods known to the person skilled in the art, such as, for example, coprecipitation, protoplast fusion, electroporation, retroviral transfection and the like, in order to cause the specified nucleic acids to be expressed in the particular expression system. Suitable systems are described, for example, in Current Protocols in Molecular Biology, F. Ausubel et al., Ed., Wiley Interscience, New York 1997, or Sambrook et al. Molecular Cloning: A Laboratory Manual. 2^{nd} edition, Cold Spring Harbor Laboratory, Cold Spring Harbor Laboratory Press, Cold Spring Harbor, N.Y., 1989.

[0412] According to the invention, it is also possible to prepare homologously recombinant microorganisms. For this purpose, a vector is prepared which comprises at least one section of a gene according to the invention or of a coding sequence in which, if appropriate, at least one amino acid deletion, addition or substitution has been introduced in order to modify, e.g. functionally disrupt, the sequence according to the invention (“knockout” vector). The inserted sequence can, for example, also be a homolog from a related microorganism or be derived from a mammal source, yeast source or insect source. The vector used for the homologous recombination can alternatively be designed so that the endogenous gene is mutated or modified in some other way during homologous recombination, but still encodes the functional protein (e.g. if the upstream regulatory region can be modified in such a way that expression of the endogenous protein is changed as a result). The modified section of the gene according to the invention is in the homologous recombination vector. The construction of suitable vectors for the homologous recombination is described, for example, in Thomas, K. R. and Capecchi, M. R. (1987) Cell 51: 503.

[0413] Suitable transgenic recombinant host organisms for the nucleic acid according to the invention or the nucleic acid construct are in principle all prokaryotic organisms (including Archaea) or eukaryotic organisms. Especially bacteria including halobacteria and methanococci, fungi, insect cells, plant cells and mammal cells. The host organisms used are advantageously microorganisms such as bacteria, fungi or yeasts, Fungi, Gram-positive or Gram-negative bacteria, preferably bacteria of the families Enterobacteriaceae, Pseudomonadaceae, Rhizobiaceae, Streptomycetaceae or Nocardiaceae, particularly preferably bacteria of the genera Escherichia, Pseudomonas, Streptomyces, Nocardia, Burkholderia, Salmonella, Agrobacterium or Rhodococcus can be used advantageously. Escherichia coli, Bacillus subtilis, Bacillus. megaterium, Pseudomonas spec., lactobacillae, Hansenula polymorpha, Aspergillus oryzea, Aspergillus nidulans, Aspergillus niger, Pichia pastoris, Trichoderma reesei and SF9 cells (or related cells) are most preferred.

[0414] The organisms used for producing the keratin-binding effector proteins according to the invention are grown or cultivated in the manner known to the person skilled in the art depending on the host organism. Microorganisms are usually grown in a liquid medium which comprises a carbon source mostly in the form of sugars, a nitrogen source mostly in the form of organic nitrogen sources such as yeast extract or salts such as ammonium sulfate, trace elements such as iron salts, manganese salts and magnesium salts and, if appropriate, vitamins, at temperatures between 0° C. and 100° C., preferably between 10° C. to 60° C. under oxygen. Here, the pH of the nutrigen liquid can be kept at a fixed value, i.e. be regulated or not regulated during the cultivation. The cultivation can be batchwise, semibatchwise or continuous. Nutrients can be initially introduced at the start of the fermentation or can be fed in afterwards semicontinuously or continuously. The enzymes can be isolated from the organisms by the process described in the examples or be used as raw extract for the reaction.

[0415] The polypeptides can thus also be produced on an industrial scale, if desired. The recombinant microorganism can be cultivated and fermented by known processes. Bacteria can be reproduced, for example, in TB or LB medium and at a temperature of from 20° C. to 40° C. and a pH of from 6 to 9. Specifically, suitable cultivation conditions are described, for example, in T. Maniatis, E. F. Fritsch and J. Sambrook, Molecular Cloning A Laboratory Manual, Cold Spring Harbor Laboratory, Cold Spring Harbor, N.Y. (1989).

### Disruption and Purification

[0416] If the polypeptides are not secreted into the culture medium, the cells are then disrupted and the product is obtained from the lyzate by known protein isolation methods. The cells can be disrupted as desired by high-frequency ultrasound, by high pressure, such as, for example, in a French pressure cell, by osmolysis, by the action of detergents, lytic enzymes or organic solvents, by homogenizers or by combining two or more of the methods fisted.

[0417] Purification of the polypeptides can be achieved using known chromatographic methods, such as molecular sieve chromatography (gel filtration), such as Q-Sepharose chromatography, ion-exchange chromatography and hydrophobic chromatography, and also with other customary methods, such as ultrafiltration, crystallization, salting out, dialysis and native gel electrophoresis. Suitable methods are described, for example, in Cooper, F.G., Biochemische Arbeitsmethoden [Biochemical working methods], Verlag Water de Gruyter, Berlin, N.Y. or in Scopes, R., Protein Purification, Springer Verlag, New York, Heidelberg, Berlin.

[0418] It may advantageous, for isolating the recombinant protein, to use vector systems or oligonucleotides which extend the cDNA by certain nucleotide sequences and thus code for modified polypeptides or fusion proteins which serve, for example, for easier purification. Such suitable modifications are, for example, so-called “tags” acting as anchors, such as, for example, the modification known as hexahistidine anchor, or epitopes which can be recognized as antigens by antibodies (described, for example, in Harlow, E. and Lane, D., 1988, Antibodies: A Laboratory Manual. Cold Spring Harbor (N.Y.) Press). Further suitable tags are, for example, HA, calmodulin-BD, GST, MBD; chitin-BD, steptavidin-BD-Avi tag, Flag tag, T7 etc. These anchors can serve to attach the proteins to a fixed support, such as, for example, a polymer matrix, which can be fed, for example, into a chromatography column, or can be used on a microtiter plate or another support. The corresponding purification protocols are available from the commercial affinity tag suppliers.

[0419] The keratin-binding effector proteins according to the invention have the desired properties of keratin-binding proteins both in their fused form, i.e. together with the fusion partner moiety, and also in isolated form. The proteins according to the invention can thus be used either directly as fusion proteins, or after cleavage and separation of the fusion partner as “pure” keratin-binding proteins.

[0420] If separation of the fusion partner is intended, it is advisable to incorporate a potential cleavage site (specific recognition site for proteases) into the fusion protein between keratin-binding protein moiety and fusion partner moiety. Suitable cleavage sites are, in particular, those peptide sequences which otherwise occur neither in the keratin-binding protein moiety nor in the fusion partner moiety, which can be ascertained easily using bioinformatic tools. Of particular suitability are, for example, BrCN cleavage on methionine, or protease-mediated cleavage with factor Xa, enterokinase, thrombin, TEV cleavage (tobacco etch virus protease).

[0421] Moreover, the present invention provides transgenic cells comprising
[0422] v) at least one of the abovementioned vectors, or
[0423] w) at least one of the abovementioned expression cassettes, or
[0424] x) at least one of the abovementioned nucleic acid molecules coding for a polypeptide comprising at least one polypeptide which is encoded by a nucleic acid molecule according to the sequence shown in SEQ ID No.: 167, 175, 181, 187, 193 or 199.

[0425] Preferably, the cells (see above) or organisms (see above) are transgenic cells or organisms which have been transformed with at least one nucleic acid molecule according to the sequence shown in SEQ ID No.: 167, 175, 181, 187, 193 or 199.

[0426] Particularly preferred transgenic organisms are Escherichia coli, Bacillus subtilis, Bacillus. megaterium, Aspergillus oryzea, Aspergillus nidulans, Aspergilius niger, Pichia pastoris, Pseudomonas spec., lactobacillae, Hansenula polymorpha, Trichoderma reesei and SF9 cells (or related cells).

Sequences

| SEQ | Sequence | |
|---|---|---|
| ID NO.: | type | Sequence description |
| 1 | Nucleic acid | Homo sapiens Desmoplakin_Accession No. NM_004415 |
| 2 | Protein | Homo sapiens Desmoplakin_Accession No. NM_004415 |
| 3 | Nucleic acid | Homo sapiens Desmoplakin_Accession No. NM_004415 domain B |
| 4 | Protein | Homo sapiens Desmoplakin_Accession No. NM_004415 domain B |
| 5 | Nucleic acid | Homo sapiens Desmoplakin_Accession No. NM_004415 domain B-1 |
| 6 | Protein | Homo sapiens Desmoplakin_Accession No. NM_004415 domain B-1 |
| 7 | Nucleic acid | Homo sapiens Desmoplakin_Accession No. NM_004415 domain B-2 |
| 8 | Protein | Homo sapiens Desmoplakin_Accession No. NM_004415 domain B-2 |
| 9 | Nucleic acid | Homo sapiens Desmoplakin_Accession No. NM_004415 domain C |
| 10 | Protein | Homo sapiens Desmoplakin_Accession No. NM_004415 domain C |
| 11 | Nucleic acid | Homo sapiens Desmoplakin_Accession No. NM_004415 domain C-1 |
| 12 | Protein | Homo sapiens Desmoplakin_Accession No. NM_004415 domain C-1 |
| 13 | Nucleic acid | Homo sapiens Desmoplakin_Accession No. NM_004415 domain C-2 |
| 14 | Protein | Homo sapiens Desmoplakin_Accession No. NM_004415 domain C-2 |
| 15 | Nucleic acid | H. sapiens_Filaggrin_Accession No. CAI19595 |
| 16 | Protein | H. sapiens_Filaggrin_Accession No. CAI19596 |
| 17 | Nucleic acid | Homo sapiens plakophilin 1 ACCESSION NM_001005337, transcript |
| | | variant 1a |
| 18 | Protein | Homo sapiens plakophilin 1 ACCESSION NM_001005337, transcript |
| | | variant 1a |
| 19 | Nucleic acid | Homo sapiens plakophilin 1 ACCESSION NM_000299, transcript variant |
| | | 1b |
| 20 | Protein | Homo sapiens plakophilin 1 ACCESSION NM_000299, transcript variant |
| | | 1b |
| 21 | Nucleic acid | Mus musculus plakophilin 2 ACCESSION NM_026163 NM_027894 |
| 22 | Protein | Mus musculus plakophilin 2 ACCESSION NM_026163 NM_027895 |
| 23 | Nucleic acid | Mus musculus plakophilin 1 ACCESSION NM_019645 |
| 24 | Protein | Mus musculus plakophilin 1 ACCESSION NM_019646 |
| 25 | Nucleic acid | Bos taurus plakophilin 1 partial mRNA, ACCESSION XM_868348 |
| 26 | Protein | Bos taurus plakophilin 1 partial mRNA, ACCESSION XM_868349 |
| 27 | Nucleic acid | Canis familiaris similar to plakophilin 1 isoform 1a, ACCESSION |
| | | XM_851528 |
| 28 | Protein | Canis familiaris similar to plakophilin 1 isoform 1a, ACCESSION |
| | | XM_851529 |
| 29 | Nucleic acid | Danio rerio similar to Plakophilin 1 ACCESSION XM_695832 |
| 30 | Protein | Danio rerio similar to Plakophilin 1 ACCESSION XM_695833 |
| 31 | Nucleic acid | Rattus norvegicus similar to plakophilin 1, ACCESSION XM_222666 |
| 32 | Protein | Rattus norvegicus similar to plakophilin 1, ACCESSION XM_222667 |
| 33 | Nucleic acid | Pan troglodytes similar to Plakophilin 1, ACCESSION XM_514091 |
| 34 | Protein | Pan troglodytes similar to Plakophilin 1, ACCESSION XM_514092 |
| 35 | Nucleic acid | Gallus gallus similar to plakophilin 1, ACCESSION XM_419240 |
| 36 | Protein | Gallus gallus similar to plakophilin 1, ACCESSION XM_419241 |
| 37 | Nucleic acid | Xenopus laevis similar to plakophilin 4, ACCESSION BI390496 |
| 38 | Protein | Xenopus laevis similar to plakophilin 4, ACCESSION BI390497 |
| 39 | Nucleic acid | Homo sapiens desmoplakin, transcript variant 2, ACCESSION |
| | | NM_001008844 |
| 40 | Protein | Homo sapiens desmoplakin, transcript variant 2, ACCESSION |
| | | NM_001008845 |
| 41 | Nucleic acid | Mus musculus desmoplakin, ACCESSION XM_621314 |
| 42 | Protein | Mus musculus desmoplakin, ACCESSION XM_621315 |
| 43 | Nucleic acid | Rattus norvegicus similar to desmoplakin isoform II, ACCESSION |
| | | XM_225259 |
| 44 | Protein | Rattus norvegicus similar to desmoplakin isoform II, ACCESSION |
| | | XM_225260 |
| 45 | Nucleic acid | Pan troglodytes desmoplakin, ACCESSION XM_518227 |
| 46 | Protein | Pan troglodytes desmoplakin, ACCESSION XM_518228 |
| 47 | Nucleic acid | Gallus gallus similar to Desmoplakin, ACCESSION XM_418957 |
| 48 | Protein | Gallus gallus similar to Desmoplakin, ACCESSION XM_418958 |
| 49 | Nucleic acid | Homo sapiens junction plakoglobin (JUP), transcript variant 2, |
| | | ACCESSION NM_021991 |
| 50 | Protein | Homo sapiens junction plakoglobin (JUP), transcript variant 2, |
| | | ACCESSION NM_021992 |
| 51 | Nucleic acid | Mus musculus, plakoglobin; gamma-catenin, ACCESSION NM_010593 |
| 52 | Protein | Mus musculus, plakoglobin; gamma-catenin, ACCESSION NM_010594 |
| 53 | Nucleic acid | Rattus norvegicus gamma-catenin (plakoglobin), ACCESSION |
| | | NM_031047 |
| 54 | Protein | Rattus norvegicus gamma-catenin (plakoglobin), ACCESSION |
| | | NM_031048 |
| 55 | Nucleic acid | Danio rerio armadillo protein family; plakoglobin, ACCESSION |
| | | NM_131177 |
| 56 | Protein | Danio rerio armadillo protein family; plakoglobin, ACCESSION |
| | | NM_131178 |
| 57 | Nucleic acid | Xenopus tropicalis junction plakoglobin, ACCESSION BC064717 |
| 58 | Protein | Xenopus tropicalis junction plakoglobin, ACCESSION BC064718 |
| 59 | Nucleic acid | Canis familiaris similar to junction plakoglobin isoform 10, ACCESSION |
| | | XM_856625 |
| 60 | Protein | Canis familiaris similar to junction plakoglobin isoform 10, ACCESSION |
| | | XM_856626 |
| 61 | Nucleic acid | Xenopus laevis Jup protein, ACCESSION BC094116 |
| 62 | Protein | Xenopus laevis Jup protein, ACCESSION BC094117 |
| 63 | Nucleic acid | Bos taurus junction plakoglobin, ACCESSION NM_001004024 |
| 64 | Protein | Bos taurus junction plakoglobin, ACCESSION NM_001004025 |
| 65 | Nucleic acid | Sus scrofa plakoglobin, ACCESSION NM_214323 |
| 66 | Protein | Sus scrofa plakoglobin, ACCESSION NM_214324 |
| 67 | Nucleic acid | Danio rerio junction plakoglobin, ACCESSION BC058305 |
| 68 | Protein | Danio rerio junction plakoglobin, ACCESSION BC058306 |
| 69 | Nucleic acid | Saccharomyces cerevisiae, plakoglobin/armadillo/beta-catenin, |
| | | ACCESSION AF005267 |
| 70 | Protein | Saccharomyces cerevisiae, plakoglobin/armadillo/beta-catenin, |
| | | ACCESSION AF005268 |
| 71 | Nucleic acid | Homo sapiens plectin 1, intermediate filament binding protein, |
| | | ACCESSION NM_201380 |
| 72 | Protein | Homo sapiens plectin 1, intermediate filament binding protein, |
| | | ACCESSION NM_201381 |
| 73 | Nucleic acid | Mus musculus plectin 1 (Plec1), transcript variant 11, mRNA, |
| | | ACCESSION NM_201394 XM |
| 74 | Protein | Mus musculus plectin 1 (Plec1), transcript variant 11, mRNA, |
| | | ACCESSION NM_201394 XM |
| 75 | Nucleic acid | Bos taurus similar to plectin 1 isoform 1 (LOC510991), ACCESSION |
| | | XM_588232 |
| 76 | Protein | Bos taurus similar to plectin 1 isoform 1 (LOC510991), ACCESSION |
| | | XM_588233 |
| 77 | Nucleic acid | Canis familiaris similar to plectin 1 isoform, ACCESSION XM_539204 |
| 78 | Protein | Canis familiaris similar to plectin 1 isoform, ACCESSION XM_539205 |
| 79 | Nucleic acid | Trypanosoma cruzi, plectin-like protein, ACCESSION XM_809849 |
| 80 | Protein | Trypanosoma cruzi, plectin-like protein, ACCESSION XM_809850 |
| 81 | Nucleic acid | Rattus norvegicus plectin, ACCESSION X59601 |
| 82 | Protein | Rattus norvegicus plectin, ACCESSION X59602 |
| 83 | Nucleic acid | Cricetulus griseus plectin, ACCESSION AF260753 |
| 84 | Protein | Cricetulus griseus plectin, ACCESSION AF260754 |
| 85 | Nucleic acid | Homo sapiens periplakin, ACCESSION NM_002705 |
| 86 | Protein | Homo sapiens periplakin, ACCESSION NM_002706 |
| 87 | Nucleic acid | Mus musculus periplakin, ACCESSION NM_008909 XM_358905 |
| 88 | Protein | Mus musculus periplakin, ACCESSION NM_008909 XM_358906 |
| 89 | Nucleic acid | Homo sapiens envoplakin, ACCESSION NM_001988 |
| 90 | Protein | Homo sapiens envoplakin, ACCESSION NM_001989 |
| 91 | Nucleic acid | Mus musculus envoplakin, ACCESSION NM_025276 XM_283024 |
| 92 | Protein | Mus musculus envoplakin, ACCESSION NM_025276 XM_283025 |
| 93 | Nucleic acid | Bos taurus similar to Envoplakin, ACCESSION XM_587641 |
| 94 | Protein | Bos taurus similar to Envoplakin, ACCESSION XM_587642 |
| 95 | Nucleic acid | Canis familiaris similar to Envoplakin, ACCESSION XM_540443 |
| 96 | Protein | Canis familiaris similar to Envoplakin, ACCESSION XM_540444 |
| 97 | Nucleic acid | Danio rerio similar to Envoplakin, ACCESSION XM_687958 |
| 98 | Protein | Danio rerio similar to Envoplakin, ACCESSION XM_687959 |
| 99 | Nucleic acid | Rattus norvegicus, similar to envoplakin, db_xref GeneID: 303687 |
| 100 | Protein | Rattus norvegicus, similar to envoplakin, db_xref GeneID: 303688 |
| 101 | Nucleic acid | Pan troglodytes similar to Envoplakin, ACCESSION XM_511692 |
| 102 | Protein | Pan troglodytes similar to Envoplakin, ACCESSION XM_511693 |
| 103 | Nucleic acid | Human bullous pemphigoid antigen, ACCESSION M63618 |
| 104 | Protein | Human bullous pemphigoid antigen, ACCESSION M63619 |
| 105 | Nucleic acid | Mus musculus bullous pemphigoid antigen 1 (Bpag1), ACCESSION |
| | | AF396877 |
| 106 | Protein | Mus musculus bullous pemphigoid antigen 1 (Bpag1), ACCESSION |
| | | AF396878 |
| 107 | Nucleic acid | Mus musculus trichohyalin-like 1, ACCESSION NM_027762 |
| 108 | Protein | Mus musculus trichohyalin-like 1, ACCESSION NM_027763 |
| 109 | Nucleic acid | Bos taurus similar to trichohyalin-like 1, ACCESSION XM_597026 |
| 110 | Protein | Bos taurus similar to trichohyalin-like 1, ACCESSION XM_597027 |
| 111 | Nucleic acid | Homo sapiens trichohyalin-like 1, ACCESSION NM_001008536 |
| | | XM_060104 |
| 112 | Protein | Homo sapiens trichohyalin-like 1, ACCESSION NM_001008536 |
| | | XM_060105 |
| 113 | Nucleic acid | Strongylocentrotus purpuratus similar to Trichohyalin, ACCESSION |
| | | XM_793822 |
| 114 | Protein | Strongylocentrotus purpuratus similar to Trichohyalin, ACCESSION |
| | | XM_793823 |
| 115 | Nucleic acid | Trypanosoma cruzi trichohyalin, putative, ACCESSION XM_809758 |
| 116 | Protein | Trypanosoma cruzi trichohyalin, putative, ACCESSION XM_809759 |
| 117 | Nucleic acid | Giardia lamblia ATCC 50803 trichohyalin, ACCESSION XM_765825 |
| 118 | Protein | Giardia lamblia ATCC 50803 trichohyalin, ACCESSION XM_765826 |
| 119 | Nucleic acid | Aspergillus fumigatus Af293, trichohyalin, ACCESSION XM_748643 |
| 120 | Protein | Aspergillus fumigatus Af293, trichohyalin, ACCESSION XM_748644 |
| 121 | Nucleic acid | O. cuniculus trichohyalin, ACCESSION Z19092 |
| 122 | Protein | O. cuniculus trichohyalin, ACCESSION Z19093 |
| 123 | Nucleic acid | Pan troglodytes similar to Trichohyalin, ACCESSION XM_526770 |
| 124 | Protein | Pan troglodytes similar to Trichohyalin, ACCESSION XM_526771 |
| 125 | Nucleic acid | Human trichohyalin (TRHY), ACCESSION L09190 |
| 126 | Protein | Human trichohyalin (TRHY), ACCESSION L09191 |
| 127 | Nucleic acid | Mus musculus small proline-rich protein 3, ACCESSION NM_011478 |
| 128 | Protein | Mus musculus small proline-rich protein 3, ACCESSION NM_011479 |
| 129 | Nucleic acid | Homo sapiens small proline-rich protein 2B (SPRR2B), ACCESSION |
| | | NM_001017418 |
| 130 | Protein | Homo sapiens small proline-rich protein 2B (SPRR2B), ACCESSION |
| | | NM_001017419 |
| 131 | Nucleic acid | Mus musculus hair follicle protein AHF, ACCESSION XM_485271 |
| 132 | Protein | Mus musculus hair follicle protein AHF, ACCESSION XM_485272 |
| 133 | Nucleic acid | Homo sapiens epiplakin 1 (EPPK1), ACCESSION NM_031308 |
| | | XM_372063 |
| 134 | Protein | Homo sapiens epiplakin 1 (EPPK1), ACCESSION NM_031308 |
| | | XM_372064 |
| 135 | Nucleic acid | Mus musculus epiplakin 1, ACCESSION NM_144848 NM_173025 |
| 136 | Protein | Mus musculus epiplakin 1, ACCESSION NM_144848 NM_173026 |
| 137 | Nucleic acid | Mus musculus structural protein FBF1, ACCESSION AF241249 |
| 138 | Protein | Mus musculus structural protein FBF1, ACCESSION AF241250 |
| 139 | Nucleic acid | Streptococcus mutans spaP gene for antigen I/II, ACCESSION X17390 |
| 140 | Protein | Streptococcus mutans spaP gene for antigen I/II, ACCESSION X17391 |
| 141 | Nucleic acid | Sequence of the PCR primer Bag 43 |
| 142 | Nucleic acid | Sequence of the PCR primer Bag 44 |
| 143 | Nucleic acid | Sequence of the PCR primer Bag 53 |
| 144 | Nucleic acid | Sequence of the PCR primer Bag 51 |
| 145 | Nucleic acid | Sequence of the PCR primer Lib197 |
| 146 | Nucleic acid | Sequence of the PCR primer Lib198 |
| 147 | Nucleic acid | Variant of the sequence according to SEQ ID No.: ID 3 mutagenisized |
| | | using the PCR-Primer Lib197 (SEQ ID No.: 145 ) and Lib198 (SEQ ID |
| | | No.: 146) |
| 148 | Nucleic acid | Sequence of the PCR primer Lib201 |
| 149 | Nucleic acid | Sequence of the PCR primer Lib2O2 |
| 150 | Nucleic acid | Nucleic acid coding for a C16 modulus of the spider silk protein ADF-4C |
| | | from Araneus diadematus |
| 151 | Protein | Translation product of the nucleic acid molecule SEQ ID No.: 150 |
| 152 | Nucleic acid | Variant of the sequence according to SEQ ID No.: ID 3; DNA fragment |
| | | which amplifies by means of the PCR primer Lib151 (SEQ ID No.: 154) |
| | | and Lib 152 (SEQ ID No.: 155) |
| 153 | Protein | Translation product of the nucleic acid molecule SEQ ID No.: 152 |
| 154 | Nucleic acid | Sequence of the PCR primer Lib151 |
| 155 | Nucleic acid | Sequence of the PCR primer Lib152 |
| 156 | Protein | KBD-B_Homo sapiens Desmoplakin_Accession No. NM_004415 domain |
| | | B-3 |
| 157 | Protein | KBD-B_Homo sapiens Desmoplakin_Accession No. NM_004415 domain |
| | | B-4 |
| 158 | Protein | KBD-B_Homo sapiens Desmoplakin_Accession No. NM_004415 domain |
| | | B-5 |
| 159 | Nucleic acid | KBD-B_Homo sapiens Desmoplakin_Accession No. NM_004415 domain |
| | | B-6 |
| 160 | Protein | KBD-B_Homo sapiens Desmoplakin_Accession No. NM_004415 domain |
| | | B-6 |
| 161 | Nucleic acid | Homo sapiens trichoplein, BC004285 |
| 162 | Protein | Homo sapiens trichoplein, BC004285 |
| 163 | Nucleic acid | Homo sapiens Desmoplakin_Accession No. NM_004415 with nucleic acid |
| | | exchange compared to SEQ ID No.: ID 1 |
| 164 | Protein | Homo sapiens Desmoplakin_Accession No. NM_004415 with amino acid |
| | | exchange at positions 905, 2687 and 2688 compared to SEQ ID No.: ID 2 |
| 165 | Nucleic acid | KBD-B_Homo sapiens Desmoplakin_Accession No. NM_004415 domain |
| | | B-7 |
| 166 | Protein | KBD-B_Homo sapiens Desmoplakin_Accession No. NM_004415 domain |
| | | B-7 |
| 167 | Nucleic acid | Chimeric nucleic acid molecule coding for the C16 modulus of the spider |
| | | silk protein ADF-4C from Araneus diadematus (SEQ ID. No.: 150) fused |
| | | with the nucleic acid molecule (SEQ ID No.: 147) coding for the KBD-B |
| | | protein. |
| 168 | Protein | Chimeric translation product of SEQ ID No.: 167 |
| 169 | Nucleic acid | Sequence of the PCR primer pLib199 |
| 170 | Nucleic acid | Sequence of the PCR primer pLib 200 |
| 171 | Nucleic acid | Nucleic acid molecule of the carotenoid binding protein (CBP) from B. mori |
| | | (Swiss prot. Q8MYA9_BOMMO) |
| 172 | Protein | Translation product of the nucleic acid molecule SEQ ID No.: 17; 1 CBP |
| | | from B. mori encoding gene |
| 173 | Nucleic acid | Sequence of the PCR primer HRe1 |
| 174 | Nucleic acid | Sequence of the PCR primer HRe2 |
| 175 | Nucleic acid | Chimeric nucleic acid molecule coding for the CBP protein (SEQ ID. |
| | | No.: 172) fused with the nucleic acid molecule (SEQ ID No.: 165) coding |
| | | for the KBD-B protein (SEQ ID. No.: 166) |
| 176 | Protein | Translation product of the nucleic acid molecule according to SEQ ID No.: |
| | | 175 |
| 177 | Nucleic acid | Sequence of the PCR primer Lib 212 |
| 178 | Nucleic acid | Sequence of the PCR primer Lib219 |
| 179 | Nucleic acid | Nucleic acid molecule coding for the metal binding protein (ZntA) from |
| | | E. coli Accession No. NP_417926 |
| 180 | Protein | Translation product of the nucleic acid molecule according to SEQ ID No.: |
| | | 179 |
| 181 | Nucleic acid | Chimeric nucleic acid molecule coding for the metal-binding protein (ZntA) |
| | | from E. coli (SEQ ID. No.: 179) fused with the nucleic acid molecule (SEQ |
| | | ID No.: 165) coding for the KBD-B protein (SEQ ID. No.: 166) |
| 182 | Protein | Translation product of the nucleic acid molecule according to SEQ ID No.: |
| | | 181 |
| 183 | Nucleic acid | Sequence of the PCR primer Bag 102 |
| 184 | Nucleic acid | Sequence of the PCR primer Bag103 |
| 185 | Nucleic acid | Nucleic acid molecule coding for the (trxA) thioredoxin gene from E. coli |
| | | Accession No. NP_418228 (Accession No. EG1103) |
| 186 | Protein | Translation product of the nucleic acid molecule according to SEQ ID No.: |
| | | 185 |
| 187 | Nucleic acid | Chimeric nucleic acid molecule coding for the thioredoxin fragment from |
| | | the vector pThioHisC (SEQ ID. No.: 185) fused with the nucleic acid |
| | | molecule (SEQ ID No.: 165) coding for the KBD-B protein (SEQ ID. No.: |
| | | 166) |
| 188 | Protein | Translation product of the nucleic acid molecule according to SEQ ID No.: |
| | | 187 |
| 189 | Nucleic acid | Sequence of the PCR primer Bag 89 |
| 190 | Nucleic acid | Sequence of the PCR primer Bag90 |
| 191 | Nucleic acid | Nucleic acid molecule coding for the eGFP fragment from the vector |
| | | pEGFP-1 (Clontech) |
| 192 | Protein | Translation product of the nucleic acid molecule according to SEQ ID No.: |
| | | 191 |
| 193 | Nucleic acid | Chimeric nucleic acid molecule coding for the eGFP fragment from the |
| | | vector pEGFP-1 (Clontech) (SEQ ID. No.: 191) fused with the nucleic acid |
| | | molecule (SEQ ID No.: 165) coding for the KBD-B protein (SEQ ID. No.: |
| | | 166) |
| 194 | Protein | Translation product of the nucleic acid molecule according to SEQ ID No.: |
| | | 193 |
| 195 | Nucleic acid | Sequence of the PCR primer Bag 93 |
| 196 | Nucleic acid | Sequence of the PCR primer Bag 94 |
| 197 | Nucleic acid | Nucleic acid molecule coding for the YaaD fragment (Accession No. |
| | | BG10075) from the vector pDX14 (OmniGene Bioproducts) |
| 198 | Protein | Translation product of the nucleic acid molecule according to SEQ ID |
| | | No.: 197 |
| 199 | Nucleic acid | Chimeric nucleic acid molecule coding for the YaaD fragment from the |
| | | vector pDX14 (OmniGene Bioproducts) (SEQ ID. No.: 197) fused with the |
| | | nucleic acid molecule (SEQ ID No.: 165) coding for the KBD-B protein |
| | | (SEQ ID. No.: 166) |
| 200 | Protein | Translation product of the nucleic acid molecule according to SEQ ID No.: |
| | | 199 |
| 201 | Protein | AAC47011 fibroin-4 from Araneus diadematus |
| 202 | Protein | Silk protein from Nephila clavipes ACCESSION AY855102 |
| 203 | Protein | Silk protein from Araneus gemmoides ACCESSION AY855101 |
| 204 | Protein | Silk protein from Araneus gemmoides ACCESSION AY855100 |
| 205 | Protein | Silk protein from Argiope aurantia ACCESSION AY855099 |
| 206 | Protein | Silk protein from Argiope aurantia ACCESSION AY855098 |
| 207 | Protein | Synthetic construct spider silk protein-like protein (SF1); accession |
| | | DQ001900 |
| 208 | Protein | Silk protein from Nephila clavipes ACCESSION U37520 |
| 209 | Protein | Synthetic construct RGD-dragline spider silk protein gene; accession |
| | | DQ186903 |
| 210 | Protein | Silk protein from Latrodectus Hesperus ACCESSION AY994149 |
| 211 | Protein | attacin = insect antibacterial protein from Bombyx mori ACCESSION |
| | | S78369 |
| 212 | Nucleic acid | KBD-D with N-terminal histidine anchor, H. sapiens plakophilin 1a |
| | | ACCESSION NM_001005337 |
| 213 | Protein | KBD-D with N-terminal histidine anchor, H. sapiens plakophilin 1a |
| | | ACCESSION NP_001005337 |
| 214 | Nucleic acid | KBD-D amino acids 1-273 with C-terminal histidine anchor, H. sapiens |
| | | plakophilin 1a ACCESSION NM_001005337 |
| 215 | Protein | BD-D amino acids 1-273 with C-termin histidine anchor, H. sapiens |
| | | plakophilin 1a ACCESSION NP_001005337 |
| 216 | Nucleic acid | Sequence of the PCR primer HRe6 |
| 217 | Nucleic acid | Sequence of the PCR primer HRe9 |
| 218 | Nucleic acid | Sequence of the PCR primer HRe7 |
| 219 | Nucleic acid | Sequence of the PCR primer HRe8 |
| 220 | Nucleic acid | Sequence of the PCR primer HRe26 |
| 221 | Nucleic acid | Sequence of the PCR primer HRe27 |
| 222 | Nucleic acid | Chimeric nucleic acid molecule consisting of nucleic acid molecule (SEQ |
| | | ID No.: 171) coding for the CBP protein (SEQ ID No.: 172) fused with the |
| | | nucleic acid molecule (SEQ ID No.: 165) coding for the KBD-B protein |
| | | (SEQ ID No.: 166), and a mutated linker sequence |
| 223 | Protein | Translation product of the nucleic acid molecule according to SEQ ID No.: |
| | | 222 |
| 224 | Protein | Mutagenized linker sequence of the nucleic acid molecule SEQ ID. No.: |
| | | 222; |
| | | Joining sequence between the nucleic acid molecules SEQ ID No.: 165 |
| | | and 171; |
| | | Mutation of the protein sequence GGTGGSELE to GGTGGSGGG |
| 225 | Nucleic acid | Sequence of the PCR primer Lib 230 |
| 226 | Nucleic acid | Sequence of the PCR primer Lib 231 |
| 227 | Nucleic acid | Chimeric nucleic acid molecule coding for the KBD-B protein (SEQ ID No.: |
| | | 166) fused with the C16 modulus of the spider silk protein ADF-4C from |
| | | Araneus diadematus (SEQ ID No.: 150) |
| 228 | Protein | Chimeric translation product of SEQ ID No.: 227 |
| 229 | Nucleic acid | Sequence of the quick change PCR primer HRe22 |
| 230 | Nucleic acid | Sequence of the quick change PCR primer HRe23 |

### EXPERIMENTAL EXAMPLES

[0427] The following examples are disclosed in order to illustrate preferred embodiments of the present invention. These examples are not to be regarded as being exhaustive or limiting the subject matter of the invention.

[0428] In the experimental description, the following abbreviations are used:

(2-amino-2-methylpropanol) AMP, (degrees Celsius) ° C., (ethylenediaminetetraacetic acid) EDTA, (hindered amine stabilizer) HAS, (1,1-difluoroethane) HFC 152, (International Nomenclature of Cosmetic Ingredients) INCI, (milliliters) ml, (minutes) min, (oil/water) O/W, (polyethylene glycol) PEG-25, (paraminobenzoic acid) PABA, (parts per million) ppm, (quantum satis) q.s., (vinylpyrrolidone) VP, (water/oil) W/O, (active ingredient) AI, (polyvinylpyrrolidone) PVP, (keratin-binding domain) KBD, (keratin-binding domain B of human desmoplakin) KBD-B, (keratin-binding domain C of human desmoplakin) KBD-C, (a construct as explained in the description, of a KBD with an effector protein/peptide, where the linkage can be brought about by a chemical reaction or have been produced directly as fusion protein, (e.g. through expression of a translation fusion DNA construct in a host organism) fusion protein-KBD, (keratin-binding domain of human plakophilin) KBD-D.

### Example 1

### Expression Vectors and Production Strains

[0429] Various expression vectors were tested for the expression of the keratin-binding domains (KBD). For this, various promoters were used (e.g. IPTG-inducible, rhamnose-inducible, arabinose-inducible, methanol-inducible, constitutive promoters, etc.). Constructs were likewise tested in which the KBD were expressed as fusion proteins (e.g. as fusion with C16 spider silk protein [Huemmerich et al.; 2004, Primary structure elements of spider dragline silks and their contribution to protein solubility; Biochemistry 43: 13604-13612] (also called C16 below), thioredoxin, or eGFP, or YaaD [B. subtilis, SWISS-PROT: P37527, PDX1], or carotenoid-binding protein [Bombyx mori, SWISS-PROT: Q8MYA9] (also called CBP below), or metal binding protein ZntA [E. coli, SWISS-PROT. P37617]) etc.). Here, both the described KBD-B (keratin-binding domain B, SEQ ID No.: 4), and KBD-C (keratin-binding domain C, SEQ ID No.: 10), and the combination of the two domains KBD-BC were expressed using the various expression systems. The vector constructs mentioned are nonlimiting for the claim.

[0430] Given by way of representative as an example is the vector map of the IPTG-inducible vectors pQE30-KBD-B (FIG. 1), pLib076 (FIG. 2) and pRee017 (FIG. 4) and pLib072 (FIG. 5). The procedure for KBD-C may also be analogous to the described vector constructions and expressions.

[0431] For the expression of the KBD, various production hosts were used, such as, for example, E. coli strains (see Ex. 2; e.g. XL10-Gold [Stratagene], BL21-CodonPlus [Stratagene], and others). However, other bacterial production hosts, such as, for example, Bacillus megaterium or Bacillus subtilis, were also used. In the case of the KBD expression in B. megaterium, the procedure was carried out analogously to: Barg, H., Malten, M. & Jahn, D. (2005). Protein and vitamin production in Bacillus megaterium. In Methods in Biotechnology-Microbial Products and Biotransformations (Barredo, J.-L., ed, 205-224).

[0432] Suitable fungal production strains are also Pichia pastoris (e.g. GS115 and KM71 [both from Invitrogen]; and others) and Aspergillus nidulans (e.g. RMS011 [Stringer, M A, Dean, R A, Sewall, T C, Timberlake, W E (1991) Rodletless, a new Aspergillus developmental mutant induced by direct gene activation. Genes Dev 5:1161-1171] and SRF200 [Karos, M, Fischer, R (1999) Molecular characterization of HymA, an evolutionarily highly conserved and highly expressed protein of Aspergillus nidulans. Mol Genet Genomics 260:510-521], and others). However, it is also possible to use other fungal production hosts, such as, for example, Aspergillus niger (KBD expression analogous to EP 0635574A1 and/or WO 98/46772) for the KBD expression.

### Example 2

### KBD Expression in E. Coli Strains with Iptg Inducible Promoters, e.g. by the Expression Plasmid pQE30-KBD-B

[0433] For the expression, various production hosts were used, such as, for example, various E. coli strains (e.g. XL10-Gold [Stratagene], BL21-CodonPlus [Stratagene], and others), Bacillus megaterium, Bacillus subtilis etc.

[0434] Described here—by way of representation as an example—is the cloning and expression of KBD-B by E. coli, transformed with pQE30-KBD-B:

Cloning of pQE30-KBD-B
[0435] Lambda-MaxiDNA (DNA-Lambda Maxi Kit, Qiagen) was prepared from a cDNA bank of human keratinocytes (BD Bioscience, Clontech, Human Keratinocyte cDNA, foreskin, primary culture in log phase, vector: □gt11).
[0436] The PCR was carried out using the following oligonucleotides:

| | |
|---|---|
| Bag 43 | |
| (5′-GGTCAGTTACGTGCAGCTGAAGG-3′) | (SEQ ID No.: 141) |
| and | |
| Bag 44 | |
| (5′ GCTGAGGCTGCCGGATCG-3′) | (SEQ ID No.: 142) |

### 50 μl PCR Mixture:

| | | |
|---|---|---|
| 10x PCR buffer Pfu Ultra High Fidelity: | 5 | μl |
| Lambda DNA (744 ng/μl) | 1 | μl (1:30 dilution) |
| dNTP's.-Mix (10 mM) | 1 | μl |
| Oligo Bag 43 (192 ng/μl) | 0.5 | μl |
| Oligo Bag 44 (181 ng/μl) | 0.5 | μl |
| Pfu Ultra High Fidelity Polymerase | 1 | μl |
| H₂O | 41 | μl |

### Temperature Program:

[0438]

$$30 x \{ \begin{matrix}2 min & - 95 ° C . \\ 30 sec & - 95 ° C . \\ 30 sec & - Gradient 50 ° C . -> 60 ° C . \\ 2 min 30 sec & - 72 ° C . \\ 10 min & - 72 ° C .\end{matrix}$$

[0439] The resulting PCR product about 1102 bp in size was cut out of an agarose gel and purified.
[0440] Using the purified PCR product as template, a 2nd PCR was then carried out:

[0441] Oligonucleotides Used:

Bag 53:

(SEQ ID No.: 143)

(5′-CGCGCCTCGAGCCACATACTGGTCTGC-3′)
and
Bag 51

(SEQ ID No.: 144)

(5′-GCTTAGCTGAGGCTGCCGGATCG-3′)

### 50 μl PCR Mixture:

| | |
|---|---|
| 10x PCR buffer TAQ: | 5 μl |
| Template from above PCR | 3.5 μl |
| dNTP's.-Mix (10 mM) | 1 μl |
| Oligo Bag 53 (345 ng/μl) | 0.5 μl |
| Oligo Bag 51 (157 ng/μl) | 0.5 μl |
| TAQ Polymerase | 1 μl |
| H₂O | 39 μl |

### Temperature Program:

[0443]

$$30 x \{ \begin{matrix}2 min & - 95 ° C . \\ 30 sec & - 95 ° C . \\ 30 sec & - 58 ° C . \\ 3 min & - 72 ° C . \\ 10 min & - 72 ° C .\end{matrix}$$

[0444] The resulting PCR product about 1073 bp in size was cut out of an agarose gel, purified and cloned in the following vector: pCR2.1-TOPO (Invitrogen).
[0445] The resulting vector pCR2.1-TOPO+KBD-B (5027 bp) was then transformed, amplified in E. coli, then cleaved with XhoI and EcoRI and the resulting KBD-B fragment was cloned in pBAD/HisA (Invitrogen; likewise cleaved with XhoI and EcoRI).
[0446] The newly formed vector pBAD/HisA+KBD-B (5171 bp) was again cleaved with SacI and StuI and the resulting KBD-B fragment was cloned in pQE30 (Qiagen; cleaved with SacI and SmaI). The resulting expression vector pQE30-KBD-B (4321 bp; see also FIG. 1) was used for the following KBD-B expressions.

[0447] The KBD-B (SEQ ID No.: 4) expressed by the vector pQE30-KBD-B in E. coli additionally included, on the N-terminus, the amino acids MRGSHHHHHHGSACEL, and, on the C-terminus, the amino acids GVDLQPSLIS (SEQ ID No.: 166).

Expression of KBD-B by pQE30-KBD-B in E. Coli
[0448] Precultures were inoculated from plate or glycerol culture with pQE30-KBD-B transformed E. coli strains (e.g. XL10-Gold [Stratagene]). Depending on the size of the main culture, inoculation with LB medium (about 1:100) was carried out in a tube or a small flask.
[0449] Antibiotics were used according to the strain used (for pQE30-KBD-B ampicillin 100 μg/ml).
[0450] Incubation was carried out at 250 rpm and 37° C.
[0451] The main culture was inoculated about 1:100 with preculture, main culture: LB medium or suitable minimal medium with the respective antibiotics. Incubation at 250 rpm and 37° C.
[0452] Induction was carried out with 1 mM IPTG above an OD(600 nm) of 0.5.
[0453] After induction for 4 h, the cells were centrifuged off.

[0454] In fermenters the procedure was analogous, although it was possible to carry out induction at very much higher OD units and thus to considerably increase the cell and protein yield.

### Example 3

### C16-KBD Expression in E. coli Strains with IPTG Inducible Promoters, e.g. by the Expression Plasmid pLib76

[0455] Various production hosts were used for the expression, such as, for example, various E. coli strains (e.g. XL10-Gold [Stratagene], BL21-CodonPlus [Stratagene], and others), Bacillus megaterium, Bacillus subtilis etc.

[0456] Described here is—by way of representation as an example—the cloning and expression of C16-KBD-B by E. coli, transformed with pLib76:

Cloning of pLib76
[0457] The BsgI cleavage site present in the KBD-B sequence of the vector pQE30-KBD-B (see Example 2) was removed using Quickchange XL Site-Directed Mutagenesis Kit (Stratagene) using the oligonucleotides Lib197 (5′-GAGCTCTCGACTCCTGACAATCAC-3′) (SEQ ID NO.: 145) and Lib198 (5′-GAGCTCGGTTCCTCCGGTACCGCCTCTCCTGCGCAACAATCTTAACG-3′) (SEQ ID NO.: 146) in accordance with the manufacturer's instructions (SEQ ID No.: 147). The resulting vector was called pLib50.
[0458] Plasmid DNA of the vector pLib50 served as matrix for a PCR with the oligonucleotides Lib201 (5′-CGTACTGCATGCGGCGGTAGCGGAGGAACTGCACAAGAGCTCGAGCCACATACTGGTCTGCT CTTGC-3-) (SEQ ID NO.: 148) and Lib202 (5′-CTGCAGGTCGACCCCCTCCTGAACAGACATTTC-3′) (SEQ ID NO.: 149). Via the oligonucleotide Lib201, a BsgI cleavage was introduced into the fragment.

[0459] The PCR were carried out in 50 μl reaction mixtures with the following compositions:

1 μl of plasmid DNA pLib50
1 μl of dNTP mix (each 10 mM; Eppendorf)
5 μL of 10×PCR buffer+MgCl₂ (Roche)
1 μl of Lib201 5′ primer (corresponds to 50 pmol)
1 μl of Lib202 3′ primer (corresponds to 50 pmol)

### 5 U of Two-polymerase (Roche)

[0460] top up to 50 μl with H₂O

[0461] The PCR reactions were carried out under the following cycle conditions:

Step 1: 5 minutes at 95° C. (denaturation)
Step 2: 60 seconds at 95° C.
Step 3: 45 seconds at 50° C. (annealing)
Step 4: 2 minutes at 72° C. (elongation)
30 cycles of steps 2-4
Step 5: 10 minutes at 72° C. (post-elongation)
Step 6: 4° C. (pause)
[0462] The resulting PCR product, approximately 924 bp in size, was cut out of an agarose gel, purified and cloned into the following vector: pCR2.1-TOPO (Invitrogen).
[0463] The resulting vector pLib58 was then transformed, amplified in E. coli, then cleaved with SphI/SalI and the resulting KBD-B fragment was cloned into pQE30-KBD-B (see Example 2; likewise cleaved with SphI/SalI).
[0464] A fragment of the C16 modulus of the spider silk protein ADF-4 (SEQ ID No.: 150) (Huemmerich et al. [2004; Primary structure elements of spider dragline silks and their contribution to protein solubility; Biochemistry 43: 13604-13612]) cleaved with BsgI/BseRI was ligated into the resulting vector pLib59 (cleaved with BsgI).
[0465] This cloning produced a chimeric nucleic acid molecule (SEQ ID No.:167) coding for the C16 protein (SEQ ID No.:151) fused with the KBD-B protein (SEQ ID No.:166). Ligation of the encoding nucleic acid molecules (SEQ ID No.:150 and SEQ ID No.:147) results in a translation fusion of said proteins and, after translation has taken place, leads to a protein according to SEQ ID No.:168. The resulting expression vector pLib76 (see also FIG. 2) was used for the subsequent C16-KBD-B expressions.
   Expression of C16-KBD-B by pLib76 in E. coli (See Also FIG. 2)
[0466] Precultures were inoculated from plate or glycerol culture with pLib76 transformed E. coli strains (e.g. XL10-Gold [Stratagene]). Depending on the size of the main culture, inoculation was carried out in a tube or in a small flask containing LB medium (about 1:100).
[0467] Antibiotics were used according to the strain used (for pLib76 ampicillin 100 μg/ml).
[0468] Incubation at 250 rpm and 37° C.
[0469] The main culture was inoculated about 1:100 with preculture, main culture: LB medium or suitable minimal medium with the respective antibiotics. Incubation at 250 rpm and 37° C.
[0470] Induction was carried out with 1 mM IPTG above an OD(600 nm) of 0.5. The cells were then incubated at 32° C. and 250 rpm.
[0471] After induction for 4 h, the cells were centrifuged off.
[0472] In fermenters, the procedure was analogous, except that induction was possible at very much higher OD units, and thus the cell and protein yield could be increased considerably.

[0473] FIG. 6 shows the expression of C16-KBD-B, which were investigated by antibodies directed toward the N-terminal His tag of the C16-KBD-B fusion, or directed toward the KBD-B domain, in a Western Blot. In each case, a protein of the same size was detected. This demonstrates that the protein expressed in E. coli actually consists of the C16 domain and also of the KBD-B domain. The IPTG concentrations used for inducing the expression achieved comparable results.

[0474] Overall, the data show that successful expression of C16-KBD-B in E. coli has been achieved.

### 3.a KBD-B-C16 Expression in a E. Coli Strain with IPTG Inducible Promoter by the Expression Plasmid pLib78

[0475] In contrast to the fusion protein variant described in Example 3 comprising N-terminally the C-16 silk protein and C-terminally the KBD-B protein, this example describes the cloning and expression of the reverse variant of said fusion protein.

[0476] Various production hosts were used for the expression, such as, for example, various E. coli strains (e.g. XL1 0-Gold [Stratagene], BL21-CodonPlus [Stratagene], BLR(DE3) [Novagen] and others), Bacillus megaterium, Bacillus subtilis etc.

[0477] Described here is—by way of representation as an example—the cloning and expression of KBD-B-C16 by E. coli, transformed with pLib78:

Cloning of pLib78
[0478] Plasmid DNA of the vector pLib15 comprising the KBD-B DNA sequence served as matrix for a PCR with the oligonucleotides

Lib230
(SEQ ID NO: 225)
(5′-AGATCTCATCACCATCACCATCACGAGCCACATACT-3′)
and
Lib231
(SEQ ID NO: 226)
(5′-AGATCTAGTTCCTCCGGTACCGCCGCTAATTAAGCTTGGCTGCAGGTC-3′)

[0479] In each case, a BglII cleavage site was introduced via the oligonucleotides Lib230 and Lib231, and a linker sequence was introduced into the fragment via the oligonucleotide Lib231.

[0480] The PCR was carried out in 100 μl reaction mixture which had the following composition:
[0481] 5 μl of plasmid-DNA pLib15
[0482] 1 μl of dNTP mix (10 mM; Eppendorf)
[0483] 10 μl of herculase buffer (10×; Stratagene)
[0484] 4 μl of Lib230 5′ primer (corresponds to 50 pmol)
[0485] 4 μl of Lib231 3′ primer (corresponds to 50 pmol)
[0486] 1 μl of herculase polymerase (5 U/μl; Stratagene)
[0487] topped up to 100 μl with H2O.

[0488] The PCR reaction were carried out under the following cycle conditions:
[0489] Step 1: 5 minutes at 95° C. (denaturation)
[0490] Step 2: 1 minute at 95° C.
[0491] Step 3: 1 minute at 60° C. (annealing)
[0492] Step 4: 1.5 minutes at 72° C. (elongation)
[0493] 30 cycles of steps 2-4
[0494] Step 5: 10 minutes at 72° C. (post-elongation)
[0495] Step 6: 4° C. (pause)

[0496] The PCR product, about 945 bp in size, was cut out of an agarose gel, purified and cloned into the vector pCR2.1-TOPO (Invitrogen). The newly formed plasmid was called pLib77.

[0497] pLib77 was then transformed, amplified in E. coli, then cleaved with BglII and the resulting KBD-B fragment was cloned into the plasmid pET21a(+)C16 comprising the C16 sequence (Hümmerich et al, 2004, Biochemistry 43: 13604-13612). The receiving vector had been cleaved beforehand with BamHI.

[0498] This cloning produced a chimeric nucleic acid molecule (SEQ ID NO: 227) coding for the KBD-B protein (SEQ ID No.: 166) fused with the C16 protein (SEQ ID No.: 151). Ligation of the coding nucleic acid molecules (SEQ ID No.: 165 and SEQ ID No.: 150) results in a translation fusion of said proteins and, after translation has taken place, leads to a protein according to SEQ ID No.: 228. The resulting expression vector pLib78 (see also FIG. 11) was used for the subsequent KBD-B-C16 expressions, Expression of KBD-B-C16 by pLib78 in E. coli
[0499] Precultures were inoculated from plate or glycerol culture with the pLib78 transformed E. coli strain BLR(DE3) from Novagen. Depending on the size of the main culture, inoculation was carried out in a tube or a small flask containing LB medium (about 1:100).
[0500] The antibiotic used was ampicillin 100 μg/ml corresponding to the vector.
[0501] Incubation at 250 rpm and 37° C.
[0502] The main culture was inoculated about 1:100 with preculture
[0503] Main culture: LB medium with ampicillin 100 pg/ml. Incubation at 250 rpm and 37° C.
[0504] Induction was carried out with 100 μM IPTG above an OD (600 nm) of 0.5. The cells were then incubated for a further 3 hours.
[0505] After induction for 3 h, the cells were centrifuged off.
[0506] In fermenters, the procedure was analogous, except that induction was possible at very much higher OD units, and thus the cell and protein yield could be increased considerably.

[0507] FIG. 12 shows the expression of KBD-B-C16 which was investigated by antibodies directed toward the T7 tag, the N-terminal His tag, or toward the KBD-B domains of the KBD-B-C16 fusion in a Western Blot. In each case, a protein of the same size was detected. This demonstrates that the protein expressed in E. coli actually consists of the C16 domain and also of the KBD-B domain.

[0508] Overall, the data show that successful expression of KBD-B-C16 in E. coli has been achieved.

[0509] Purification of the protein was carried out as described in Example 11. The purified fusion protein KBD-B-C16 had the expected relative molecular mass of about 82 500. It could be demonstrated with antibodies directed toward the His tag, with antibodies directed toward the T7 tag and antibodies directed toward the KBD-B.

[0510] In order to check the functionality of the formed fusion protein KBD-B-C16 with regard to keratin-binding domain, a hair-binding test was carried out (see Example 16). In this, binding of the fusion protein to hair was demonstrated. The functionality of the C16 protein moiety in the KBD-B-C16 fusion protein was checked by means of producing microbead and film assembly forms (for method, see Example 22a). The KBD-B-C16 fusion protein assembled to films and microbeads and thus behaved like the C16-KBD-B-fusion protein.

### Example 4

### Carotenoid Binding Protein (CBP)-KBD Expression in E. coli Strains with IPTG Inducible Promoters, e.g. by the Expression Plasmid pRee017

[0511] For the expression, various production hosts were used, such as, for example, various E. coli strains (e.g. XL10-Gold [Stratagene], BL21-CodonPlus [Stratagene], and others), Bacillus megaterium, Bacillus subtilis etc.

[0512] Described here is—by way of representation as an example—the cloning and expression of CBP-KBD-B by E. coli, transformed with pRee017:

Cloning of pRee017
[0513] The DNA of the gene coding for the CBP from B. mori (SWISS-PROT: Q8MYA9) was prepared synthetically and ligated into a plasmid vector. The resulting plasmid 051794pPCR-script served as matrix for a PCR with the oligonucleotides Lib199 (5′-GAGCTCGCCGACTCTACGTCGAAAAGC-3′) (SEQ ID NO.: 169) and Lib200 (5′-GAGCTCAGAACCTCCGGTAGCACCGATTTCGGCTCTGGCCTTCGCTTGGCCAC-3′) (SEQ ID NO.: 170).

[0514] The PCR were carried out in 100 μl reaction mixtures with the following composition,
[0515] 1 μl of plasmid DNA 051794 pPCR-script with CBP
[0516] 1 μl of dNTP-mix (each 10 mM; Eppendorf)
[0517] 10 μl of 10× Herculase buffer (Stratagene)
[0518] 4 μl of Lib199 5′ primer (240 μg/ml)
[0519] 4 μl of Lib200 3′ primer (730 μg/ml)
[0520] 5 U of Herculase (Stratagene)
[0521] top up to 100 μl with H₂O

[0522] The PCR reactions were carried out under the following cycle conditions:
[0523] Step 1: 5 minutes at 95° C. (denaturation)
[0524] Step 2: 1 minute at 95° C.
[0525] Step 3: 1 minute at 58° C. (annealing)
[0526] Step 4: 1.5 minutes at 72° C. (elongation)
[0527] 30 cycles of steps 2-4
[0528] Step 5: 10 minutes at 72° C. (post-elongation)
[0529] Step 6: 40C (pause)
[0530] The resulting PCR product, about 918 bp in size, was cut out of an agarose gel, purified and cloned into the following vector: pCR2.1-TOPO (Invitrogen).
[0531] The resulting vector pLib54 was then transformed and amplified in E. coli.

[0532] The CBP gene was amplified in the next step with the primers

HRe1

(SEQ ID No.: 173)

(5′-AAAGCATGCGCCGACTCTACGTCGAAAAGCGCG-3′)
and
HRe2

(SEQ ID No.: 174)

(5′-CCTTGAGCTCAGAACCTCCGGTACCACCGAT-3′) by a PCR.

### 50 μl of PCR Mixture:

| | |
|---|---|
| 10x of PCR buffer for Accu Prime | 5 μl |
| Polymerase (Invitrogen) | |
| pLib54 (50 ng) | 1 μl |
| dNTP's.-Mix (10 mM) | 3 μl |
| Oligo HRe1 (312 ng/μl) | 1 μl |
| Oligo HRe2 (338 ng/μl) | 1 μl |
| Accu Prime Polymerase (Invitrogen) | 1 μl |
| H₂O | 38 μl |

### Temperature Program:

[0534]

$$29 x \{ \begin{matrix}1 min . & - 95 ° C . \\ 1 min . & - 95 ° C . \\ 1 min . & - 52 ° C . \\ 3 min . & - 72 ° C . \\ 8 min & - 72 ° C .\end{matrix}$$

[0535] The resulting fragment (SEQ ID No.: 171) was cleaved with SphI and SacI and cloned into pQE30-KBD-B (see Example 2; likewise cleaved with SphI and SacI). This cloning produced a chimeric nucleic acid molecule (SEQ ID No.: 175) coding for the COBP protein (SEQ ID No.:172) fused with the KBD-B protein (SEQ ID No.:166). The resulting expression vector pRee017 (FIG. 4) thus comprised the nucleic acid molecule (SEQ ID. No.:175) coding for the CBP protein (SEQ ID. No.:172) fused with the nucleic acid molecule (SEQ ID No.: 165) coding for the KBD-B protein (SEQ ID. No.: 166). Ligation of said nucleic acid molecules results in a translation fusion of said proteins and, after translation has taken place, leads to a protein according to SEQ ID No.:176).

[0536] In a further embodiment, a further variant of the chimeric nucleic acid molecule with the SEQ ID No.: 175 was produced in which the joining sequence, which joins the two nucleic acids coding for the CBP protein (SEQ ID No.: 172) and the KBD-B protein (SEQ ID No.: 166) was changed through targeted mutagenesis (Quick Change Site Directed Mutagenesis Kit, Stratagene). The procedure was carried out in accordance with the manufacturer's instructions. The oligonucleotides used were HRe22 (SEQ ID No: 229) and HRe23 (SEQ ID No: 230). The template used was pRee017 (FIG. 4).

[0537] The resulting expression vector pRee023 thus comprised the nucleic acid molecule SEQ ID No.: 222 which codes for a fusion protein consisting of the CBP protein (SEQ ID No.: 172) and the KBD-B protein (SEQ ID No.: 166), where the sequence joining the two proteins is a mutagenized linker sequence (SEQ ID No: 224). Ligation of said nucleic acid molecules results in a translation fusion of said proteins and, after translation has taken place, leads to a fusion protein according to SEQ ID No.: 223, which is characterized by particular proteolytic stability in the production strain. The resulting expression vectors pRee017 (see also FIG. 4) and pRee023 were used for the following CBP-KBD-B expressions.

Expression of CBP-KBD-B by pRee017 or pRee023 in E. coli
[0538] Precultures were inoculated from plate or glycerol culture with pRee017 or pRee023 transformed to E. coli strains. Depending on the size of the main culture, inoculation was carried out in a tube or in a small flask LB medium (about 1:100)
[0539] Antibiotics were used according to the strain used (for strains transformed with pRee017 or pRee023, 100 μg/ml of ampicillin)
[0540] Incubation at 250 rpm and 37° C.,
[0541] The main culture was inoculated about 1:100 with preculture, main culture: LB medium or suitable minimal medium with the respective antibiotics. Incubation at 250 rpm and 37° C.
[0542] Induction was carried out with 1 mM IPTG above an OD (600 nm) of 5. The cells were then incubated at 32° C. and 250 rpm.
[0543] After induction for 4 h, the cells were centrifuged off.
[0544] Purification of the protein was carried out as described in Example 11.
[0545] The purified fusion protein CBP-KBD had the expected relative molecular mass of about 70 000. It could be detected with antibodies directed toward the His tag and antibodies directed toward KBD.

### Example 5

### Metal Binding Protein (ZntA)-KBD Expression in E. coli Strains with IPTG Inducible Promoters, e.g. by the Expression Plasmid pLib72

[0546] For the expression, various production hosts were used, such as, for example, various E. coli-strains (e.g. XL10-Gold [Stratagene], BL21-CodonPlus [Stratagene], and others), Bacillus megaterium, Bacillus subtilis etc.

[0547] Described here is—by way of representation as an example—the cloning and expression of ZntA-KBD-B by E. coli, transformed with pLib72:

Cloning of pLib72
[0548] Chromosomal E. coli DNA served as matrix for PCR with the oligonucleotides Lib212 (5′-GAGCTCTCGACTCCTGAGAATCAC-3′) (SEQ ID NO: 177) and Lib219 (5′-GAGCTCGGTTCCTCCGGTACCGCCTCTCCTGCGCAACAATCTTAACG-3′) (SEQ ID No: 178).
[0549] The resulting PCR product, about 2223 bp in size, was cut out of an agarose gel, purified and cloned into the following vector: pCR2.1-TOPO (Invitrogen).
[0550] The resulting vector pLib71 was then transformed, amplified in E. coli, then cleaved with SacI and the resulting zntA fragment (SEQ ID No.: 179) was cloned into pQE30-KBD-B (see Example 2; likewise cleaved with SacI). This cloning produced a chimeric nucleic acid molecule (SEQ ID. No.:181), coding for the ZntA protein (SEQ ID. No.:180) fused with the KBD-B protein (SEQ ID. No.: 166). The resulting expression vector pLib72 (FIG. 5) thus comprised a nucleic acid molecule (SEQ ID. No.:179) coding for the ZntA protein (SEQ ID. No.:180) fused with the nucleic acid molecule (SEQ ID No.: 165) coding for the KBD-B protein (SEQ ID. No.: 166). The ligation of said nucleic acid molecules results in a translation fusion of said proteins and, after translation has taken place, leads to a protein according to SEQ ID No.:182. The resulting expression vector pLib72 (see also FIG. 5) was used for the following ZntA-KBD-B expressions.

[0551] The PCR were carried out in 50 □l reaction mixtures with the following composition:
[0552] 1 □l of genom. DNA XL10-Gold (1.7 μg)
[0553] 1 □l of dNTP-Mix (each 10 mM; Eppendorf)
[0554] 5 □l of 10× Herculase buffer (Stratagene)
[0555] 1 □l of Lib212 5′ primer (341 μg/ml)
[0556] 2 □l of Lib219 3′ primer (464 μg/ml)
[0557] 5 U of Herculase (Stratagene)
[0558] top up to 50 μl with H₂O

[0559] The PCR reactions were carried out under the following cycle conditions:
[0560] Step 1: 5 minutes at 95° C. (denaturation)
[0561] Step 2: 1 minute at 95° C.
[0562] Step 3: 45 seconds at 60° C. (annealing)
[0563] Step 4: 2 minutes at 72° C. (elongation)
[0564] 35 cycles of steps 2-4
[0565] Step 5: 10 minutes at 72° C. (post-elongation)
[0566] Step 6: 4° C. (pause)

### Example 6

### Thioredoxin-KBD Expression in E. coli Strains with IPTG Inducible Promoters

[0567] For the expression, various production hosts were used, such as, for example, various E. coli strains (e.g. XL10-Gold [Stratagene], BL21-CodonPlus [Stratagene], and others), Bacillus megaterium, Bacillus subtilis etc.

[0568] Described here is—by way of representation as an example—the cloning and expression of thioredoxin-KBD-B by E. coli:

[0569] Firstly, the thioredoxin fragment of interest from the vector pThioHisC (Invitrogen) was amplified by PCR (PCR mixture conditions analogous to Example 2). For this purpose, the following oligonucleotides were used:

Bag 102:

(SEQ ID No.: 183)

(5′-GTAAGAATGCGGCGGCCTCCTGAACAGACATTTCTTTATTG-3′)
Bag 103:

(SEQ ID No.: 184)

(5′-GCAGATCTAGAGGATCGCATCACCATCACCATCACGGATCC-3′)

[0570] The amplified PCR product (SEQ ID No.: 185) was cut out of an agarose gel, purified, cleaved with the restriction endoribonucleases NotI and BglII and cloned into pQE30-KBD-B (see Example 2).
[0571] This cloning produced a chimeric nucleic acid molecule (SEQ ID. No.:187) coding for the thioredoxin protein (SEQ ID. No.:186) fused with the KBD-B protein (SEQ ID. No.: 166). The resulting expression vector thus comprised a nucleic acid molecule (SEQ ID. No.:185) coding for the thioredoxin protein (SEQ ID. No.:186) fused with the nucleic acid molecule (SEQ ID No.: 165) coding for the KBD-B protein (SEQ ID. No.: 166). Ligation of said nucleic acid molecules results in a translation fusion of said proteins and, after translation has taken place, leads to a protein according to SEQ ID No.:188. The resulting expression vector was used for the following thioredoxin-KBD-B expressions.

### Example 7

### eGFP-KBD Expression In E. coli Strains with IPTG Inducible Promoters

[0572] For the expression, various production hosts were used, such as, for example, various E. coli strains (e.g. XL10-Gold [Stratagene], BL21-CodonPlus [Stratagene], and others), Bacillus megaterium, Bacillus subtilis etc.

[0573] Described here—by way of representation as an example—are the cloning and expression of eGFP-KBD-B by E. coli:

[0574] Firstly, the eGFP fragment of interest was amplified from the vector pEGFP-1 (Clontech) by PCR (PCR mixture conditions analogous to Example 2). For this purpose, the following oligonucleotides were used:

| | |
|---|---|
| Bag 89: | (5′-GCGAGCTCGTGAGCAAGGGCGAGGAGC-3′) |
| Bag 90: | (5′-GGGAGCTCCTTGTACAGCTCGTCCATG-3′) |

[0575] The amplified PCR product (SEQ ID No.: 191) was cut out of an agarose gel, purified, cleaved with the restriction endoribonuclease SacI and cloned into pQE30-KBD-B (see Example 2).
[0576] This cloning produced a chimeric nucleic acid molecule (SEQ ID. No.: 193) coding for the eGFP protein (SEQ ID. No.:192) fused with the KBD-B protein (SEQ ID. No.: 166). The resulting expression vector thus comprised a nucleic acid molecule (SEQ ID. No.:191) coding for the eGFP protein (SEQ ID. No.:192) fused with the nucleic acid molecule (SEQ ID No.: 165) coding for the KBD-B protein (SEQ ID. No.: 166). Ligation of the specified nucleic acid molecules results in a translation fusion of said proteins and, after translation has taken place, leads to a protein according to SEQ ID No.:194. The resulting expression vector was used for the following eGFP-KBD-B expressions.

### Example 8

### YaaD-KBD Expression in E. coli Strains with IPTG Inducible Promoters

[0577] For the expression, various production hosts were used, such as, for example, various E. coli strains (e.g. XL10-Gold [Stratagene], BL21-CodonPlus [Stratagene], and others), Bacillus megaterium, Bacillus subtilis inter alia.

[0578] Described here is—by way of representation as an example—the cloning and expression of YaaD-KBD-B by E. coli:

[0579] Firstly, the YaaD fragment of interest from the vector pDX14 (OmniGene Bioproducts) was amplified by PCR (PCR mixture conditions analogous to Example 2). For this purpose, the following oligonucleotides were used:

Bag 93:

(SEQ ID No: 195)

(5′-GCGAGCTCGCTCAAACAGGTACTGAACG-3′)
Bag 94:

(SEQ ID No: 196)

(5′-GCGAGCTCCCAGCCGCGTTCTTGCATACG-3′)

[0580] The amplified PCR product (SEQ ID No.: 197) was cut out of an agarose gel, purified and ligated into pCR2.1 TOPO (without restriction digestion). The YaaD was cut out of the plasmid pCR2.1 TOPO-YaaD with SacI and cloned into pQE30-KBD-B (see Example 2).
[0581] This cloning produced a chimeric nucleic acid molecule (SEQ ID. No.:199) coding for the yaaD protein (SEQ ID. No.:198) fused with the KBD-B protein (SEQ ID. No.: 166). The resulting expression vector thus comprised a nucleic acid molecule (SEQ ID. No.:197) coding for the yaaD protein (SEQ ID. No.:198) fused with the nucleic acid molecule (SEQ ID No.: 165) coding for the KBD-B protein (SEQ ID. No.: 166). Ligation of the specified nucleic acid molecules results in a translation fusion of said proteins and, after translation has taken place, leads to a protein according to SEQ ID No.: 200. The resulting expression vector was used for the following yaaD-KBD-B expressions.

[0582] It goes without saying that the DNA constructs produced by way of example in Examples 3 to 8 for producing keratin-binding fusion proteins can also be produced using the vector pRee024 (FIG. 8, Ex. 18-22). The fusion proteins thus formed comprise the KBD-D protein (SEQ ID No.: 212) in the case of pRee024.

### Example 9

### Expression of KBD by Means of Aspergillus nidulans Strains Using the Inducible alcA Promoter, e.g. by the Expression Plasmid pLib 19 (Shaking Flask)

[0583] For the expression, A. nidulans wild-type strains were used, such as, for example, RMS01 1 or SRF200. Described here is—by way of representation as an example—the expression of KBD-B by A. nidulans, transformed with pLib19 (FIG. 6).
[0584] For the construction of pLib19, a KBD-B-encoding DNA fragment 922 bp (SEQ ID No.: 152) in size, was amplified by means of PCR using the oligonucleotides Lib151 (5′-CACCATGCATCACCATCACCATCACGAGCCACATACTGGTCTGCT-3′ (SEQ ID No.: 154) and Lib152 (5′-GCTAATTAAGCTTGGCTGCA-3′ (SEQ ID No.: 155) and the vector pQE30-KBD-B (Example 2, FIG. 1) as template.
[0585] The PCR were carried out in 50 □l reaction mixtures with the following composition:
[0586] 1 □l of plasmid DNA pQE30-KBD-B
[0587] 1 □l of dNTP-Mix (each 10 mM; Eppendorf)
[0588] 5 □l of 10×PCR buffer+MgCl₂ (Roche)
[0589] 1 □l of Lib151 5′ primer (corresponds to 50 pmol)
[0590] 1 □l of Lib152 3′ primer (corresponds to 50 pmol)
[0591] 5 U of Pwo-polymerase (Roche)
[0592] The PCR reactions were carried out under the following cycle conditions:
[0593] Step 1: 5 minutes at 95° C. (denaturation)
[0594] Step 2: 45 seconds at 95° C.
[0595] Step 3: 45 seconds at 53° C. (annealing)
[0596] Step 4: 2 minutes at 72° C. (elongation)
[0597] 30 cycles of steps 2-4
[0598] Step 5: 10 minutes at 72° C. (post-elongation)
[0599] Step 6: 4° C. (pause)
[0600] The PCR product was ligated into the vector pENTR/D (pENTR™ Directional TOPO® Cloning Kit, Version E, Invitrogen). The correct KBD-B amplification was checked by sequencing.
[0601] The recombination of the KBD-B encoding DNA fragment was carried out into the vector pMT-OvE (Toews M W, Warmbold J, Konzack S, Rischitor P, Veith D, Vienken K, Vinuesa C, Wei H, Fischer R; Establishment of mRFP1 as a fluorescent marker in Aspergillus nidulans and construction of expression vectors for high-throughput protein tagging using recombination in vitro (GATEWAY). (2004) Curr Genet 45: 383-389) using the “Gateway® LR Clonase™ enzyme mix” (Invitrogen). This produced the vector pLib19 (FIG. 6).
[0602] Protoplasts of the A. nidulans wild-type strains were transformed with the circular vector pLib19 (Yelton M M, Hamer J E, Timberlake W E; Transformation of Aspergillus nidulans by using a trpC plasmid., (1984) Proc Natl Acad Sci USA 81: 1479-1474). The transformants were analyzed by means of PCR and Southern blot using chromosomal DNA.
[0603] For the preculture of KBD-B-expressing A. nidulans transformants, 100 ml of minimal medium (0.6% NaNO₃; 0.152% KH₂PO₄; 0.052% KCl [pH 6.5]; 0.8% glucose; 0.05% MgSO₄; 1 ml trace element solution [1 g/l FeSO₄×7H₂O; 8.8 g/l ZnSO₄×7H₂O; 0.4 g/l CuSO₄×5H₂O; 0.15 g/l MnSO₄×4H₂O; 0.1 g/l Na₂B₄O₇×10H₂O; 0.05 g/l (NH₄)₆Mo₇O₂₄×4H₂O], +strain-specific supplements) or 100 ml of complete medium (2% malt extract; 0.1% peptone; 2% glucose; +strain-specific supplements) were inoculated in 500 ml flasks with 10⁶-10⁷ spores and incubated for 16-24 h at 200-250 rpm and 37° C.
[0604] After the preculture, the fungal mycelium was harvested by filtration, washed with distilled water and transferred to flasks with 100-500 ml of fresh minimal medium. In this main culture medium, 0.1% fructose was used instead of glucose as the C-source. To induce the KBD expression, ethanol (1% final concentration) or glycerol (50 mM) or sodium acetate (50 mM) or ethylamine or threonine were additionally added to the medium. The additives mentioned for inducing the expression are not limiting for the claim. The main culture was incubated for a further 5-48 h at 200-250 rpm and 37° C.
[0605] After the end of the culture, the fungal mycelium was harvested with 1500-3000×g for 5 min at room temperature and disrupted by means of a Menton-Gaulin.
[0606] Besides the polypeptide sequence SEQ ID No.: 4, the KBD-B expressed in A. nidulans (SEQ ID No.: 152) (pLib19) additionally included, at the N-terminus, the amino acids MHHHHHH, and, at the C-terminus, the amino acids

GVDLQPSLISKGGRADPAFLYKVVMIRLLTKPERKLLEGGPGTQLLFPLVRVNCALGVIM-
VIAVSGVKLLSAHNSTQHTSRKHKV.

### Example 10

### Cell Disruption and Inclusion Body Purification (pQE30-KBD-B)

[0607] Solubly expressed KBD or fusion protein-KBD could be used directly following cell disruption (e.g. by means of Menton-Gaulin) or be purified by means of chromatography (see Example 11). Insolubly expressed KBD or fusion protein-KBD (e.g. in inclusion bodies) was purified as follows:
[0608] The fermenter contents were centrifuged, the pellet was suspended in 20 mM phosphate buffer pH=7.5 and disrupted by means of a Menton-Gaulin.
[0609] The disrupted cells were centrifuged again (15 000g), the pellet from this was treated with 20 mM phosphate, 500 mM NaCl and 8 M urea and so stirred. (Dissolution of the inclusion bodies)
[0610] The pH of the supernatant was adjusted to 7.5.
[0611] Centrifugation was then carried out again and the supernatant was applied to an Ni chelate Sepharose column and purified as described in Example 6.

### Example 11

### Purification of Keratin-Binding Domain B or Fusion Protein-KBD Over Ni Chelate Sepharose

[0612] The KBD or fusion protein-KBD could be purified chromatographically through the attached His-tag over an Ni column.

Column material: Ni-Sepharose High Performance
[0613] Amersham Biosciences Order No.:17-5268-02

[0614] The material was packed into a column (e.g. diameter 2.6 cm, height 10 cm) and equilibrated with buffer A+4% buffer B (corresponds to 20 mM imidazole).

[0615] The protein extract (see e.g. cell disruption and inclusion body purification) was applied to the column at pH 7.5 using a Superloop (ÄKTA system) (flow about 5 ml/min).

[0616] Following application, washing was carried out with buffer A+20 mM imidazole.

[0617] Elution was carried out with buffer B (500 mM imidazole in buffer A).

[0618] The eluate was collected in fractions using a fraction collector.

[0619] The eluate was then freed from salt (advantageous for samples which are to be concentrated). For this, the eluate was freed from salt, for example, over a Sephadex G25 medium column (Amersham). Then, for the concentration, for example an Amicon chamber (stirred ultrafiltration cell, Millipore) could be used.

| | |
|---|---|
| Buffer A: | 20 mM sodium dihydrogenphosphate |
| | 500 mM NaCl (if desired, it is also possible to use buffers |
| | with lower NaCl concentrations) |
| | 8 M urea (urea does not need to be used if “active” KBD is |
| | chromatographed which has already been solubly expressed. |
| | Without urea, no subsequent renaturation of the protein |
| | is required.) |
| | pH = 7.50 |

| | | |
|---|---|---|
| Buffer B: | 20 mM | sodium dihydrogenphosphate |
| | 500 mM | NaCl (if desired, it is also possible to use buffers |
| | | with lower NaCl concentrations) |
| | 8 M | urea |
| | 500 mM | imidazole |
| | pH = 7.50 | |

### Example 12

### Renaturation of Keratin-Binding Domain B or Fusion Protein-KBD

[0620] Insolubly expressed keratin-binding domain or fusion protein-KBD (e.g. from inclusion bodies) can be renatured and thus activated as follows:

### Method 1: Discontinuous Dialysis

[0621] 6.5 ml of Cellytic IB (Sigma, order No. C5236) and 5 mM DTT were added to 6.5 ml of KBD-B inclusion bodies or fusion protein-KBD in 8 M urea (Ni chelate eluate, HiTrap). The solution to be renatured was then poured into a dialysis tube (Spectrum: Spectra Por MWCO:12-14 kD).

[0622] Carry out dialysis for about 12 hours against 1 L 6 M urea solution at 4° C. with careful stirring.

[0623] 500 ml of 25 mM Tris/HCl pH=7.50 were added and dialysis was carried out like this for 9 hours at 4° C. Subsequent addition of a further 250 ml of the Tris buffer (see above) and dialysis for a further 12 hours.

[0624] 500 ml of 25 mM Tris/HCl pH=7.50 were then added again and dialysis was carried out like this for 9 hours at 4° C. Subsequent addition of a further 250 ml of the Tris buffer (see above) and dialysis for a further 12 hours.

[0625] 500 ml of 25 mM Tris/HCl pH=7.50 were then added again and dialysis was carried out like this for 9 hours at 4° C. The dialysis tube containing the dialyzate was then placed into 2 L: 25 mM Tris+150 mM NaCl pH=7.50. Dialysis was then carried out again at 4° C. for 12 hours.

[0626] The contents of the dialysis tube were then removed.

### Method 2: Continuous Dialysis

[0627] 20 ml of KBD-B inclusion bodies (or fusion protein-KBD) in 8 M urea (Ni chelate eluate, HiTrap) were treated with 10 ml of Cellytic IB (Sigma, order No. C5236) and 5 mM DTT. The solution was then poured into a a dialysis chamber: Slide-A-Lyzer Dialyses Cassette PIERCE, MWCO: 10 kD. order No.: 66830.

[0628] Dialysis was then carried out for about 1 hour against 1 L 6 M urea solution at 4° C.

[0629] Then, over a period of 48 h, 2 l of the following buffer were metered in continuously by means of a peristaltic pump: 25 mM Tris/HCl pH=7.5.

[0630] The dialysis tube containing the dialyzate was then added to 2 L of the end buffer:

[0631] 25 mM Tris+150 mM NaCl pH=7.50 and dialysis was carried out for about 12 hours at 4° C.

[0632] The contents of the dialysis tube were then removed.

### Example 13

### Binding to Skin 1 (Qualitative)

[0633] A visual qualitative test was developed in order to examine whether KBD or fusion protein-KBD binds to skin.

### Solutions Used:

[0634] Blocking solution: Western Blocking Reagent 1921673 Roche (10× solution) diluted in TBS.

### TBS: 20 mM Tris; 150 mM NaCl pH 7.5

### TTBS: TBS+0.05% Tween20

[0635] The first step is the transfer of the outer keratin layer of the skin to a stable support. For this purpose, a transparent adhesive tape is firmly applied to depilated human skin and removed again. The test can be carried out directly on the transparent adhesive strip, or the adhering keratin layer can be transferred to a glass slide through renewed adhesion. Binding was demonstrated as follows:
[0636] For incubation with the various reagents, transfer to a Falcon vessel
[0637] If appropriate addition of ethanol for degreasing, removal of ethanol and drying of the slide
[0638] Incubation with blocking buffer for 1 h at room temperature
[0639] 2× washing for 5 min with TTBS
[0640] 1× washing for 5 min with TBS
[0641] Incubation with the KBD or fusion protein-KBD to be tested (coupled to tag—e.g. His₆, HA etc.) or control protein in TBS/0.05% Tween 20 for 2-4 h at room temperature
[0642] Removal of the supernatant
[0643] 3× washing with TBS
[0644] Incubation for 1 h at room temperature with monoclonal anti-polyhistidine (or specific KBD rabbit) antibodies, diluted 1:2000 in TBS+0.01% blocking
[0645] 2× washing for 5 min with TTBS
[0646] 1× washing for 5 min with TBS
[0647] Incubation for 1 h at room temperature with anti-mouse IgG alkaline-phosphatase conjugate, diluted 1:5000 in TBS+0.01% blocking
[0648] 2× washing for 5 min with TTBS
[0649] 1× washing for 5 min with TBS
[0650] Addition of phosphatase substrate (NBT-BCIP; Boehringer MA 1 tablet/40 ml of water 2.5 min; stop: with water)
[0651] Optical detection of the colored precipitate with the naked eye or using a microscope. A blue colored precipitate indicates that KBD or fusion protein-KBD has bound to the skin.

### Example 14

### Binding to Skin 2 (Quantitative)

[0652] A quantitative test was developed with which the hair/skin binding strength of the KBD or fusion protein-KBD can be compared with nonspecific proteins.

[0653] A 5 mm cork borer was used to bore a section out of a thawed dry piece of skin without hair (human or pig) (or in the case of a surface test a section of skin is inserted into a Falcon lid). The sample of skin was then converted to a thickness of 2-3 mm in order to remove any tissue present. The skin sample was then transferred to an Eppendorf vessel (protein low-bind) in order to carry out the binding demonstration (see also FIG. 7; alternatively, the Episkin system [reconstituted human skin] from L'Oreal can also be used):
[0654] 2× washing with PBS/0.05% Tween 20
[0655] Addition of 1 ml of 1% BSA in PBS and incubation for 1 h at room temperature, gentle swinging movements (900 rpm).
[0656] Removal of the supernatant
[0657] Addition of 100 μg of KBD or fusion protein-KBD in PBS with 0.05% Tween 20; incubation for 2 h at room temperature and gentle swinging movements (900 rpm).
[0658] Removal of the supernatant
[0659] 3× washing with PBS/0.05% Tween 20
[0660] Incubation with 1 ml of monoclonal mouse anti-tag (His6 or HA or specific KBD) antibodies with peroxidase conjugate (1:2000 in PBS with 0.05% Tween 20) [Monoclonal AntipolyHistidine Peroxidase Conjugate, produced in mouse, lyophilized powder, Sigma] for 2-4 h at room temperature, gentle swinging movement (900 rpm)
[0661] 3× washing with PBS/0.05% Tween 20
[0662] Addition of peroxidase substrate (1 ml/Eppendorf vessel; composition see below)
[0663] Allow reaction to run until a blue coloration (about 90 seconds).
[0664] Stop the reaction with 100 μl of 2 M H₂SO₄.
[0665] The absorption was measured at 405 nm.

[0666] Peroxidase substrate (prepare shortly beforehand):

0.1 ml TMB solution (42 mM TMB in DMSO)
+10 ml substrate buffer (0.1 M sodium acetate pH 4.9)
+14.7 μl H₂O₂ 3% strength

### Example 15

### Binding to Hair (Quantitative)

[0667] In order to be able to demonstrate the binding strength of KBD or fusion protein-KBD to hair also relative to other proteins, a quantitative assay was developed (see also FIG. 7). In this test, hair was firstly incubated with KBD (or fusion protein-KBD) and excess KBD (or fusion protein-KBD) was washed off. An antibody-peroxidase conjugate was then coupled via the His tag of the KBD (or fusion protein-KBD). Nonbound antibody-peroxidase conjugate was washed off again. The bound antibody-peroxidase conjugate [Monoclonal AntipolyHistidine Peroxidase Conjugate, produced in mouse, lyophilized powder, Sigma] can convert a colorless substrate (TMB) into a colored product, which can be measured photometrically at 405 nm. The intensity of the absorption indicates the amount of bound KBD (or fusion protein-KBD) or comparison protein. The comparison protein chosen was, for example, YaaD from B. subtilis, which likewise had—as is necessary for this test—a His tag for the detection. Instead of the His tag, other specific antibodies conjugated with—peroxidase can also be used.

[0668] 5 mg of hair (human) are cut into sections 5 mm in length and transferred to Eppendorf vessels (protein low-bind) in order to carry out the binding demonstration:
[0669] Addition of 1 ml of ethanol for degreasing
[0670] Centrifugation, removal of ethanol and washing of the hair with H₂O
[0671] Addition of 1 ml of 1% BSA in PBS and incubation for 1 h at room temperature, gentle swinging movements.
[0672] Centrifugation, removal of the supernatant
[0673] Addition of the keratin-binding domains (or fusion protein-KBD) to be tested (coupled to tag—e.g. His₆, HA etc.) or control protein in 1 ml of PBS/0.05% Tween 20; incubation for 16 h at 4° C. (or at least 2 h at room temperature) with gentle swinging movements.
[0674] Centrifugation, removal of the supernatant
[0675] 3× washing with PBS/0.05% Tween 20
[0676] Incubation with 1 ml monoclonal mouse anti-tag (His6 or HA) antibodies with peroxidase conjugate (1:2000 in PBS/0.05% Tween 20) [Monoclonal AntipolyHistidine Peroxidase Conjugate, produced in mouse, lyophilized powder, Sigma] for 2-4 h at room temperature, gentle swinging movement
[0677] 3× washing with PBS/0.05% Tween 20
[0678] Addition of peroxidase substrate (1 ml/Eppendorf vessel)
[0679] Allow reaction to proceed until blue coloration (about 2 minutes).
[0680] Stop the reaction with 100 μl of 2 M H₂SO₄.
[0681] The absorption is measured at 405 nm.

[0682] Peroxidase substrate (prepare shortly beforehand):

0.1 ml TMB solution (42 mM TMB in DMSO)
+10 ml of substrate buffer (0.1 M sodium acetate pH 4.9)
+14.7 μl H₂O₂ 3% strength
BSA=Bovine serum albumin
PBS=Phosphate buffered salt solution
Tween 20=polyoxyethylene sorbitan monolaureate, n about 20
TMB=3,5,3′,5′-tetramethylbenzidine

[0683] A binding test on hair carried out by way of example for KBD-B demonstrated considerable superiority of the binding of KBD-B (SEQ ID No.: 166) to hair compared with significantly poorer binding of the comparison protein YaaD:

TABLE 7
Quantitative KBD activity test Hair: 1) buffer; 2) comparison protein
YaaD; 3) KBD-B denatured; 4) KBD-B renatured. The table shows
the measured absorption values at 405 nm.

| | | |
|---|---|---|
| 1 | Buffer | A_{405 nm} = 0.000 |
| 2 | Comparison protein YaaD | A_{405 nm} = 0.088 |
| 3 | KBD-B denatured | A_{405 nm} = 0.254 |
| 4 | KBD-B renatured | A_{405 nm} = 1.591 |

### Example 16

### Hair Binding Activity of Fusion Protein-KBD-B

[0684] In order to check whether the fusion protein-KBD-B also binds to hair, a quantitative binding assay was carried out (see FIG. 7). in this test, hair was firstly incubated with fusion protein-KBD-B and nonbound fusion protein-KBD-B was washed off. A peroxidase was then coupled via the His tag of KBD-B. Nonbound peroxidase was washed off again. The bound peroxide can convert a colorless substrate (TMB) into a colored product, which was measured photometrically at 405 nm. The intensity of the absorption indicates the amount of bound fusion protein-KBD-B. The comparison sample chosen was KBD-B without fusion protein.

| | | |
|---|---|---|
| 1 | KBD-B reference sample | A_{405 nm} = 0.65 |
| 2 | C16-KBD-B fusion protein | A_{405 nm} = 0.59 |

[0685] Measurement of the hair-binding activity of the C16-KBD-B fusion protein in comparison to a KBD-B reference protein. As these results show, the hair-binding activity of the fusion protein (A_{405 nm}=0.59) compared to the KBD-B protein (A_{405 nm}=0.65) is virtually unchanged.

[0686] Overall, these activity tests show that the various fusion protein-KBD-B constructs have good hair binding activity, like KBD-B itself. In most cases, the hair binding activity is not reduced at all, but at least very seldomly below 20% of the binding activity of KBD-B without fusion protein.

### Example 16a

### Binding of Beta-Carotene to the CBP-KBD Fusion Protein Prepared According to Example 4

[0687] A binding test to hair carried out by way of example for the fusion protein CBP-KBD-B (SEQ ID No. 223) showed a comparable binding of CBP-KBD-B (SEQ ID No. 223) to hair compared with the protein KBD-B (SEQ ID No. 4). The same applies to a hair-binding test carried out by way of example with C16-KBD (SEQ ID No. 168) and KBD-B-C16 (SEQ ID 228).

[0688] The binding of beta-carotene to CBP-KBD (SEQ ID No. 223) compared to KBD (SEQ ID No. 4) was investigated. The UV-Vis absorption spectrum of beta-carotene has a maximum at 440 nm. This property was used for investigating the beta-carotene binding to the fusion protein. Firstly, varying concentrations (0-20 μM) of a CBP-KBD solution were admixed with identical amounts of an ethanolic beta-carotene solution. As the concentration of the fusion protein increased, the coloration of the solution increased. This observation was confirmed by photometric measurement at 440 nm.

| | 0 μM CBP- | 10 μM CBP- | 20 μM CBP- |
|---|---|---|---|
| | KBD-B | KBD-B | KBD-B |
| Average | 0.059 | 0.195 | 0.261 |
| absorption | | | |
| at 440 nm | | | |

[0689] In order to verify the binding of beta-carotene to the CBP-KBD fusion protein, in each case a KBD and CBP-KBD solution (each of identical molarity) was admixed with identical concentrations of an ethanolic beta-carotene solution and dialyzed overnight against buffer. On the next day, the binding of beta-carotene was determined through absorption measurement of the solutions at 440 nm and compared with a calibration curve of a beta-carotene solution. It was established that CBP-KBD binds twice as much beta-carotene compared to KBD despite dialysis. The results show that successful binding of beta-carotene by the fusion protein is achieved.

### Example 17

### Checking the Coupling Success (Ellmann Test)

[0690] The success of the effector coupling was monitored using two different tests:
[0691] (iv) Ellmann test in which the number of free Cys-SH groups in the protein can be determined before and after the chemical effector protein coupling. Here, a considerable reduction in the free SH groups after coupling indicates good reaction progress.
[0692] (v) Activity test in which the binding of the KBD (or fusion protein-KBD) to hair can be measured.

[0693] A good fusion protein-KBD should reduce the activity of the fusion protein-KBD compared with uncoupled KBD.

Re (iii)

### Materials Required:

[0694] Ellmann's reagent: 5,5′-dithiobis(2-nitrobenzoic acid) (DTNB); 4 mg 1 ml in 0.1 M Na phosphate buffer
[0695] 0.1 M Na phosphate buffer pH 8.0
[0696] Cysteine solution (26.3 mg of cysteine hydrochloride monohydrate/100 ml Na phosphate buffer)

[0697] The solutions were and must only be prepared shortly prior to use.

1. In each case 25 μl, 50 μl, 100 μl, 150 μl, 200 μl and 250 μl of cysteine solution were pipetted into test tubes (13×100 mm) for a calibration curve. The protein samples to be determined were poured into separate test tubes (volume <=250 μl). Of the KBD to be tested, an amount of at least 1 mg per reaction mixture was dispensed. In the case of the test tubes, the total volume was then adjusted in each case to 250 μl with Na phosphate buffer. If the volume of 250 μl of sample was exceeded (on account of the required 1 mg of KBD), this was taken into consideration when topping up in point 2 with 2.5 ml of Na phosphate buffer.
2. Addition of in each case 50 μl of Ellmann's reagent and 2.5 ml of Na phosphate buffer. Briefly mix and incubate for 15 min at RT.
3. Measure the absorption at 412 nm
4. Construct the calibration curves, plot and read off the values of the protein samples to be determined.

### Example 18

### Expression of KBD-D (SEQ ID No.: 212) by Means of Escherichia Coli Strains Using the Expression Plasmid pRee024 with an IPTG Inducible Promoter (FIG. 8)

[0698] For the expression, the E. coli strain XL10 Gold [Stratagene] was used.

[0699] Described here, by way of representation as an example, is the cloning of KBD-D (SEQ ID No.: 212) and the subsequent expression of the KBD-D protein (SEQ ID No.: 213) in E. coli, transformed with pRee024 (FIG. 8);

Cloning of pRee024:
[0700] Lambda-MaxiDNA (DNA-Lambda Maxi Kit, Qiagen) was produced from a cDNA bank of human keratinocytes (BD Bioscience, Clontech, Human Keratinocyte cDNA, foreskin, primary culture in log phase, vector, λgt11).

[0701] The PCR for the amplification of the KBD-D gene was carried out in two steps. Firstly, the 5′ end and 3′ end was amplified independently. These fragments were the matrices for the amplification of the entire KBD-D gene.

[0702] The PCR for the amplification of the 5′ end was carried out as follows:

[0703] The primers had the following sequence:

HRe6:

(SEQ ID No.: 216)

5′-ATGAACCACTCGCCGCTCAAGACGCCTTG-3′
HRe9:

(SEQ ID No.: 217)

5′-CGTTCCCGGTTCTCCTCAGGAGGCTGACTG-3′

### 100 μl PCR-Mixture:

| | |
|---|---|
| 10x PCR buffer Pfu Ultra High Fidelity: | 10 μl |
| Lambda DNA (744 ng/μl) | 1 μl |
| | (1:10 dilution) |
| dNTP's.-Mix (10 mM) | 10 μl |
| HRe6 (196 ng/μl) | 1 μl |
| HRe9 (201 ng/μl) | 1 μl |
| Pfu Ultra High Fidelity Polymerase | 1 μl |
| H₂O bidist | 76 μl |

### Temperature Program:

[0705]

$$30 x \{ \begin{matrix}2 min & 95 ° C . \\ 30 sec & 95 ° C . \\ 30 sec & 63 ° C . \\ 1 min 30 sec & 72 ° C .\end{matrix}$$

[0706] A fragment about 1 kb in size was detected in the agarose gel. The reaction was purified and used below as 5′ end template for the amplification of the KBD-D gene.

[0707] The PCR for the amplification of the 3′ end was carried out as follows:

[0708] The primers had the following sequence:

HRe7:

(SEQ ID No.: 218)

5′-TTAGAATCGGGAGGTGAAGTTCCTGAGGCT-3′
HRe8:

(SEQ ID No.: 219)

5′-CACCACCAACAAGCTGGAGACCCGGAG-3′

### 100 μl PCR Mixture:

| | |
|---|---|
| 10x PCR buffer Pfu Ultra High Fidelity: | 10 μl |
| Lambda DNA (744 ng/μl) | 1 μl |
| | (1:10 dilution) |
| dNTP's.-Mix (10 mM) | 10 μl |
| HRe7 (201 ng/μl) | 1 μl |
| HRe8 (209 ng/μl) | 1 μl |
| Pfu Ultra High Fidelity Polymerase | 1 μl |
| H₂O bidist. | 76 μl |

### Temperature Program:

[0710]

$$30 x \{ \begin{matrix}2 min & 95 ° C . \\ 30 sec & 95 ° C . \\ 30 sec & 63 ° C . \\ 1 min 30 sec & 72 ° C .\end{matrix}$$

[0711] A fragment about 1.2 kb in size was detected in the agarose gel. The reaction was purified and used below as 3′ end template for the amplification of the KBD-D gene.
[0712] For the amplification of the KBD-D gene, the 5′ end template and the 3′ end template was used as matrix. The PCR was carried out as follows:

### 100 μl PCR Mixture:

| | |
|---|---|
| 10x PCR buffer Pfu Ultra High Fidelity: | 10 μl |
| dNTP-Mix (10 mM) | 10 μl |
| H₂O bidist. | 75 μl |
| 5′ end template | 1 μl |
| 3′ end template | 1 μl |
| Pfu Ultra High Fidelity Polymerase | 1 μl |
| H₂O | 76 μl |

### Temperature Program:

[0714]

$$10 ( \{ \begin{matrix}60 sec & 94 ° C . \\ 300 sec & 72 ° C .\end{matrix}$$

[0715] After the 10 cycles, 1 μl of primer HRe6 (196 pg/ml) and HRe7 (206 pg/ml) and 1 μl of Pfu Ultra High Fidelity Polymerase was added, and the following temperature program was carried out with the reaction:

### Temperature Program:

[0716]

$$30 x \{ \begin{matrix}•2 min & 95 ° C . \\ 30 sec & 95 ° C . \\ 30 sec & 63 ° C . \\ 1 min 30 sec & 72 ° C .\end{matrix}$$

[0717] 1 μl of Taq polymerase was then added thereto and the mixture was incubated for 10 minutes at 72° C.
[0718] The resulting PCR product, about 2150 bp in size, was cut out of an agarose gel, purified and cloned into the following vector: pCR2.1-TOPO (Invitrogen).
[0719] The resulting vector pRee019 (6112 bp) was then transformed, amplified in E. coli and the KBD-D gene was checked by a sequencing.

[0720] The KBD-D gene was then cloned into the expression vector. For this, a further PCR was carried out with the vector pRee019 as template:

### Oligonucleotides Used:

HRe26:

(SEQ ID No.: 220)

5′-CTCGGTACCAACCACTCGCCGCTCAAGACCGCCTTGGCG-3′
HRe27:

(SEQ ID No.: 221)

5′-ATTAAGCTTTTAGAATCGGGAGGTGAAGTTCCTGAGGCT-3′

### 100 μl PCR Mixture:

| | |
|---|---|
| 10x PCR buffer Pfu Ultra High Fidelity: | 10 μl |
| pRee019 (25 ng/μl) | 1 μl |
| dNTP's.-Mix (10 mM) | 10 μl |
| HRe26 (287 ng/μl) | 1 μl |
| HRe27 (354 ng/μl) | 1 μl |
| Pfu Ultra High Fidelity Polymerase | 1 μl |
| H₂O bidist. | 76 μl |

### Temperature Program:

[0723]

$$30 x \{ \begin{matrix}2 min & 95 ° C . \\ 30 sec & 95 ° C . \\ 30 sec & 79 ° C . \\ 1 min 30 sec & 72 ° C .\end{matrix}$$

[0724] A fragment about 2.2 kb in size was detected in the agarose gel. The reaction was purified and then cleaved with the restriction endonucleases KpnI and HindIII; the resulting fragment was cloned into the expression vector. This gave the vector pRee024, which was used subsequently for the KBD-D expression.

[0725] Expression of KBD-D (SEQ ID No.: 212) by pRee024 in E. Coli
[0726] Preclutures were inoculated from plate or glycerol culture with pRee024 transformed in E. coli strains (e.g. TG10). Depending on the size of the main culture, inoculation with LB medium (about 1:100) was carried out in a tube or a small flask.
[0727] Antibiotics were used according to the strains used (for E. coli TG10 transformed with pRee024, ampicillin 100 μg/ml)
[0728] Incubation at 250 rpm and 37° C.
[0729] The main culture was inoculated about 1:100 with preculture, main culture: LB medium or suitable minimal medium with the respective antibiotics. Incubation at 250 rpm and 37° C.
[0730] Induction was carried out with 1 mM IPTG above an OD_{578 nm} of 1. The incubation temperature was then lowered to room temperature (about 20° C.). The cells were centrifuged off 2 hours after induction. (See FIG. 9).

### Example 19

### Cell Disruption and Inclusion Body Purification (pRee024)

[0731] Insolubly expressed KBD-D (SEQ ID No.: 213) (e.g. in inclusion bodies) was purified as follows:

[0732] The cell sediment from Example 2 was resuspended in 20 mM phosphate buffer with 100 mM NaCl pH=7.5 and disrupted through ultrasound treatment.

[0733] The disrupted cells were centrifuged again (4° C., 12 000 g, 20 minutes). The supernatant was discarded.

[0734] The sediment was dissolved in buffer A (10 mM NaH₂PO₄, 2 mM KH₂PO₄, 100 mM NaCl, 8 M urea, 5 mM DTT). Centrifugation was then carried out again and the supernatant was applied to an Ni chelate sepharose. Following application, washing was carried out with buffer A and 20 mM imidazole. Elution from the column was carried out with buffer B (10 mM NaH₂PO₄, 2 mM KH₂PO₄, 100 mM NaCl, 8 M urea, 5 mM DTT, 500 mM imidazole). The eluate was collected in fractions and analyzed by means of SDS-PAGE. Fractions which comprised purified KBD-D were renatured, as described in Example 13.

### Example 20

### Renaturation of Keratin-Binding Domain D (SEQ ID No.: 213)

[0735] Insolubly expressed keratin-binding domain D (e.g. from inclusion bodies) could be renatured through a dialysis and thus activated. The procedure was as follows:

[0736] The fractions from Example 19 which comprised purified KBD-D were poured into a dialysis tube (MWCO 12-14 KD).

[0737] Dialysis was then carried out for about 1 hour against 1 l 8 M urea solution.

[0738] Then, over a period of 12 hours, 2 l of deionized water were metered in continuously using a peristaltic pump.

[0739] The contents of the dialysis tube were then removed. The KBD-D activated in this way was used for the following activity tests.

### Example 21

### Qualitative Binding to Skin

[0740] A visual qualitative test was used in order to examine whether the KBD-D (SEQ ID No.: 213) binds to skin.

### Solutions Used:

[0741] Blocking solution: Western blocking reagent 1921673 Roche (10× solution) diluted in TBS

### TBS: 20 mM Tris; 150 mM NaCl pH 7.5

### TTBS: TBS+0.05% Tween 20

[0742] The first step is the transfer of the outer keratin layer from the skin to a stable support. For this purpose, a transparent adhesive tape is firmly applied to depilated human skin and removed again. The test can be carried out directly on the transparent adhesive strip, or the adhering keratin layer can be transferred to a glass slide through renewed adhesion. Binding was demonstrated as follows:
[0743] for incubation with the various reagents, transfer to a Falcon vessel, if appropriate addition of ethanol for degreasing, removal of ethanol and drying of the slide
[0744] incubation with blocking buffer for 1 h at room temperature
[0745] 2× washing for 5 min with TTBS
[0746] 1 (washing for 5 min with TBS
[0747] incubation with the KBD to be tested (coupled to tag—e.g. His6, HA etc.) in TBS/0.05% Tween 20 for 2-4 h at room temperature
[0748] removal of the supernatant
[0749] 3 (washing with TBS
[0750] incubation for 1 h at room temperature with monoclonal mouse anti-tag (His6 or HA) antibodies with peroxidase conjugate (1:2000 in TBS+0.01% blocking) [monoclonal antipolyhistidine peroxidase conjugate, produced in mouse, lyophilized powder, Sigma]
[0751] 2× washing for 5 min with TTBS
[0752] 1× washing for 5 min with TBS
[0753] addition of phosphatase substrate (NBT-BCIP; Boehringer MA 1 tablet/40 ml of water 2.5 min; stop: with water)
[0754] optical detection of the colored precipitate with the naked eye or using a microscope. A blue-colored precipitate, being a reaction of the antipolyhistidine-APconjugate interacting with the KBD-D, was visible on the transparent adhesive tape treated with KBD-D. As a negative control, a transparent adhesive tape was treated only with buffer. Here, no significant blue coloration could be detected. These results show that KBD-D has bound to the skin keratin on the transparent adhesive strip.

### Example 22

### Quantitative Binding to Skin and Hair

[0755] In order to investigate the binding strength of KBD-D (SEQ ID No.: 213) to skin and hair compared to KBD-B (SEQ ID No.: 166), a quantitative test was carried out. In this test, hair was firstly incubated with KBD-B or KBD-D and excess KBD-B or -D was washed off. An antibody-peroxidase conjugate was then coupled via the His tag of the KBD-B or -D. Nonbound antibody-peroxidase conjugate was washed off again. The bound antibody-peroxidase conjugate can convert a colorless substrate (TMB) into a colored product, which was measured photometrically at 405 nm. The intensity of the absorption indicates the amount of bound KBD-B or -D.

[0756] The test for binding to hair was carried out with human keratinocytes in microtiter plates as follows.
[0757] 2× washing with PBS/0.05% Tween 20
[0758] Addition of 1 ml of 1% BSA in PBS and incubation for 1 h at room temperature, gentle swinging movements (900 rpm).
[0759] Removal of the supernatant
[0760] Addition of 100 μg of KBD in PBS with 0.05% Tween 20; incubation for 2 h at room temperature and gentle swinging movements (900 rpm).
[0761] Removal of the supernatant
[0762] 3× washing with PBS/0.05% Tween 20
[0763] Incubation with 1 ml of monoclonal mouse anti-tag-His6 antibodies for 2-4 h at room temperature, gentle swinging movement (900 rpm)
[0764] 3× washing with PBS/0.05% Tween 20
[0765] Addition of peroxidase substrate (1 ml/Eppendof vessel; composition see below) reaction until a blue coloration (about 90 seconds).
[0766] The reaction stopped with 100 μl of 2 M H₂SO₄.
[0767] The absorption was measured at 405 nm.

[0768] Peroxidase substrate (prepared shortly beforehand):

0.1 ml TMB solution (42 mM TMB in DMSO)
+10 ml of substrate buffer (0.1 M sodium acetate pH 4.9)
+14.7 μl H₂O₂ 3% strength

[0769] In order to characterize the hair binding of the KBD-D compared to the KBD-B, the following binding assay was carried out:

[0770] 5 mg of hair (human) were cut into sections 5 mm in length and transferred to Eppendorf vessels (protein low-bind).
[0771] Addition of 1 ml of ethanol for degreasing
[0772] Centrifugation, removal of ethanol and washing of the hair with H₂O
[0773] Centrifugation, removal of the supernatant
[0774] Addition of the keratin-binding domain to be tested (coupled to tag—e.g. His₆, HA etc.) in 1 ml of PBS/0.05% Tween 20; incubation for 2 h at room temperature with gentle swinging movements.
[0775] Centrifugation, removal of the supernatant
[0776] 3× washing with PBS/0.05% Tween 20
[0777] Incubation with 1 ml monoclonal mouse antitag (His6 or HA) antibodies with peroxidase conjugate (1:2000 in PBS/0.05% Tween 20) [monoclonal antipolyhistidine peroxidase conjugate, produced in mouse, lyophilized powder, Sigma] for 2-4 h at room temperature, gentle swinging movement
[0778] 3× washing with PBS/0.05% Tween 20
[0779] Addition of peroxidase substrate (1 ml/Eppendorf vessel)
[0780] Allow reaction to proceed until blue coloration (90 seconds).
[0781] Stop the reaction with 100 μl of 2 M H₂SO₄.

[0782] The absorption was measured at 405 nm

[0783] Peroxidase substrate (prepare shortly beforehand):

0.1 ml of TMB solution (42 mM TMB in DMSO)
+10 ml of substrate buffer (0.1 M sodium acetate pH 4.9)
+14.7 μl H₂O₂ 3% strength
BSA=Bovine serum albumin
PBS=Phosphate buffered salt solution
Tween 20=Polyoxyethylene sorbitan monolaureate, n about 20

### TMB=3,5,3′,5′-Tetramethylbenzidine

TABLE 10a
Quantitative binding of KBD-D or KBD-B to skin. The absorption
values listed are values standardized to the surface (of skin)

| Keratin-binding domain | Absorption at 405 nm |
|---|---|
| KBD-D to skin | 3.69 |
| KBD-D to skin after 10% | 3.15 |
| strength SDS treatment | |
| KBD-B to skin | 0.93 |
| KBD-B to skin after 10% | 0.185 |
| strength SDS treatment | |

TABLE 10b
Quantitative binding of KBD-D to hair. The absorption
values listed are values standardized to the surface

| Keratin-binding domain | Absorption at 405 nm |
|---|---|
| KBD-D to skin | 0.88 |
| KBD-D to skin at 10% | 0.62 |
| strength SDS treatment | |

TABLE 10c
Quantitative binding of KBD-D and KBD-B to skin and hair
after 10% strength SDS treatment in % relative to the KBD-D
and KBD-B untreated hair or skin.

| | Relative absorption |
|---|---|
| | loss after 10% strength |
| Keratin-binding domain | SDS treatment in % |
| KBD-D to skin after 10% strength SDS treatment | 15 |
| KBD-B to skin after 10% strength SDS treatment | 80 |
| KBD-D to hair after 10% strength SDS treatment | 30 |
| KBD-B to hair after 10% strength SDS treatment | 86 |

[0785] These results show that the protein KBD-D can bind to hair and more strongly to skin (see Tab. 10). In contrast to the KBD-B (SEQ ID No.: 166), the binding of the KBD-D (SEQ ID No.: 168) is only influenced relatively little as a result of washing with an up to 10% strength SDS solution (see Tab. 10a).

### Example 22a

### Microbeads and Films of C16-KBD

[0786] In experimental assays, it was the intention to show whether the fusion protein C16-KBD can form assembly forms and bind to hair. Microbeads were produced from aqueous solution (5 mM KH₂PO₄ after dialysis) by precipitation with 1-3 vol. of 1 M KH₂PO₄ buffer. Pure C16 spider silk protein forms spherical microparticles with a size distribution of about 100 nm-10 μM (FIG. 9). The C16-KBD-B fusion protein also forms spherical particles (FIG. 9).

[0787] Films can likewise be produced from aqueous protein solutions (5 mM KH₂PO₄ after dialysis) or from a 10-50 mg/ml C16-KBD-B-fusion protein-comprising hexafluoroisopropanol solution. For this purpose, in the laboratory, a few ml of the solution are pipetted onto a polysterol surface (e.g. agar plate) and the solvent is evaporated. This gives a water-soluble protein film which can be removed from the surface. The special quality of the C16 spider silk protein is that this water-soluble film can be subsequently processed and thus rendered water-insoluble. For this, the film of KH₂PO₄ is subsequently treated with 100% ethanol. The C16 protein film is then no longer water-soluble. If the C16-KBD-B solution is applied to a polysterol surface, then, after drying, a film likewise forms which becomes water-insoluble following treatment with ethanol. In summary, it can be established that assembly forms can be produced from C16-KBD fusion protein.

### Example 22b

### Film Formation on Hair

[0788] The aim was to show whether film formation of the C16-KBD fusion protein takes place on hair. For this, hair was incubated in the corresponding protein solutions or without protein, dried and analyzed by means of electron microscopy (SEM) (see FIG. 10).

[0789] Following treatment of a hair surface with C16-KBD, the hair scales are significantly smoothed, which points to filming of the C16-KBD-B fusion protein on the hair surface.

[0790] Dermocosmetic preparations according to the invention comprising the keratin-binding effector molecule C16-KBD-B (according to SEQ ID No.: 168) prepared according to Example 3 are described below. The C16-KBD-B is referred to in the examples below as fusion protein-KBD by way of representation for all of the other KBD fusion proteins described above. It will be appreciated by the person skilled in the art that all of the other specified KBD fusion proteins can also be prepared using the corresponding KBD fusion protein constructs (e.g. KBD-D protein according to (SEQ ID No.: 212) in pRee024 (FIG. 8) according to Example 3, and be used in the preparations specified below.

### Example 23

### Use of the KBD in an Emulsion for Daycare—O/W Type

| | |
|---|---|
| % | Ingredient (INCI) |

Al 1%:

| | | |
|---|---|---|
| A | 1.7 | Ceteareth-6, Stearyl Alcohol |
| | 0.7 | Ceteareth-25 |
| | 2.0 | Diethylamino Hydroxybenzoyl Hexyl Benzoate |
| | 2.0 | PEG-14 Dimethicone |
| | 3.6 | Cetearyl Alcohol |
| | 6.0 | Ethylhexyl Methoxycinnamate |
| | 2.0 | Dibutyl Adipate |
| B | 5.0 | Glycerin |
| | 0.2 | Disodium EDTA |
| | 1.0 | Panthenol |
| | q.s. | Preservative |
| | 67.8 | Aqua dem. |
| C | 4.0 | Caprylic/Capric Triglyceride, Sodium Acrylates Copolymer |
| D | 0.2 | Sodium Ascorbyl Phosphate |
| | 1.0 | Tocopheryl Acetate |
| | 0.2 | Bisabolol |
| | 1.0 | Caprylic/Capric Triglyceride, Sodium Ascorbate, Tocopherol, |
| | | Retinol |
| | 1.0 | Aqueous solution with about 5% fusion protein-KBD |
| E | q.s. | Sodium Hydroxide |

Al 5%:

| | | |
|---|---|---|
| A | 1.7 | Ceteareth-6, Stearyl Alcohol |
| | 0.7 | Ceteareth-25 |
| | 2.0 | Diethylamino Hydroxybenzoyl Hexyl Benzoate |
| | 2.0 | PEG-14 Dimethicone |
| | 3.6 | Cetearyl Alcohol |
| | 6.0 | Ethylhexyl Methoxycinnamate |
| | 2.0 | Dibutyl Adipate |
| B | 5.0 | Glycerin |
| | 0.2 | Disodium EDTA |
| | 1.0 | Panthenol |
| | q.s. | Preservative |
| | 63.8 | Aqua dem. |
| C | 4.0 | Caprylic/Capric Triglyceride, Sodium Acrylates Copolymer |
| D | 0.2 | Sodium Ascorbyl Phosphate |
| | 1.0 | Tocopheryl Acetate |
| | 0.2 | Bisabolol |
| | 1.0 | Caprylic/Capric Triglyceride, Sodium Ascorbate, Tocopherol, |
| | | Retinol |
| | 5.0 | Aqueous solution with about 5% fusion protein-KBD |
| E | q.s. | Sodium Hydroxide |

Preparation: Heat phases A and B separately from one another to about 80° C. Stir Phase B into phase A and homogenize. Stir phase C into the combined phases A and B and homogenize again. Cool with stirring to about 40° C., add phase D, adjust the pH to about 6.5 using phase E, homogenize and cool to room temperature with stirring.
Note:
The formulation is prepared without protective gas. Bottling must take place into oxygen-impermeable packagings, e.g. aluminum tubes.

### Example 24

### Use of the KBD in a Protective Day Cream—O/W Type

| | |
|---|---|
| % | Ingredient (INCI) |

Al 1%:

| | | |
|---|---|---|
| A | 1.7 | Ceteareth-6, Stearyl Alcohol |
| | 0.7 | Ceteareth-25 |
| | 2.0 | Diethylamino Hydroxybenzoyl Hexyl Benzoate |
| | 2.0 | PEG-14 Dimethicone |
| | 3.6 | Cetearyl Alcohol |
| | 6.0 | Ethylhexyl Methoxycinnamate |
| | 2.0 | Dibutyl Adipate |
| B | 5.0 | Glycerin |
| | 0.2 | Disodium EDTA |
| | 1.0 | Panthenol |
| | q.s. | Preservative |
| | 68.6 | Aqua dem. |
| C | 4.0 | Caprylic/Capric Triglyceride, Sodium Acrylates Copolymer |
| D | 1.0 | Sodium Ascorbyl Phosphate |
| | 1.0 | Tocopheryl Acetate |
| | 0.2 | Bisabolol |
| | 1.0 | Aqueous solution with about 5% fusion protein-KBD |
| E | q.s. | Sodium Hydroxide |

Al 5%:

| | | |
|---|---|---|
| | 1.7 | Ceteareth-6, Stearyl Alcohol |
| | 0.7 | Ceteareth-25 |
| | 2.0 | Diethylamino Hydroxybenzoyl Hexyl Benzoate |
| | 2.0 | PEG-14 Dimethicone |
| | 3.6 | Cetearyl Alcohol |
| | 6.0 | Ethylhexyl Methoxycinnamate |
| | 2.0 | Dibutyl Adipate |
| B | 5.0 | Glycerin |
| | 0.2 | Disodium EDTA |
| | 1.0 | Panthenol |
| | q.s. | Preservative |
| | 64.6 | Aqua dem. |
| C | 4.0 | Caprylic/Capric Triglyceride, Sodium Acrylates Copolymer |
| D | 1.0 | Sodium Ascorbyl Phosphate |
| | 1.0 | Tocopheryl Acetate |
| | 0.2 | Bisabolol |
| | 5.0 | Aqueous solution with about 5% fusion protein-KBD |
| E | q.s. | Sodium Hydroxide |

Preparation: Heat phases A and B separately from one another to about 80° C.. Stir phase B into phase A and homogenize. Incorporate phase C into the combined phases A and B and homogenize. Cool with stirring to about 40° C.. Add phase D, adjust the pH to about 6.5 using phase E and homogenize. Cool to room temperature with stirring.

### Example 25

### Use of the KBD in a Face-Cleansing Lotion—O/W Type

| | |
|---|---|
| % | Ingredient (INCI) |

Al 1%:

| | | |
|---|---|---|
| A | 10.0 | Cetearyl Ethylhexanoate |
| | 10.0 | Caprylic/Capric Triglyceride |
| | 1.5 | Cyclopentasiloxane, Cyclohexasilosane |
| | 2.0 | PEG-40 Hydrogenated Castor Oil |
| B | 3.5 | Caprylic/Capric Triglyceride, Sodium Acrylates Copolymer |
| C | 1.0 | Tocopheryl Acetate |
| | 0.2 | Bisabolol |
| | q.s. | Preservative |
| | q.s. | Perfume oil |
| D | 3.0 | Polyquaternium-44 |
| | 0.5 | Cocotrimonium Methosulfate |
| | 0.5 | Ceteareth-25 |
| | 2.0 | Panthenol, Propylene Glycol |
| | 4.0 | Propylene Glycol |
| | 0.1 | Disodium EDTA |
| | 1.0 | Aqueous solution with about 5% fusion protein-KBD |
| | 60.7 | Aqua dem. |

Al 5%:

| | | |
|---|---|---|
| A | 10.0 | Cetearyl Ethylhexanoate |
| | 10.0 | Caprylic/Capric Triglyceride |
| | 1.5 | Cyclopentasiloxane, Cyclohexasiloxane |
| | 2.0 | PEG-40 Hydrogenated Castor Oil |
| B | 3.5 | Caprylic/Capric Triglyceride, Sodium Acrylates Copolymer |
| C | 1.0 | Tocopheryl Acetate |
| | 0.2 | Bisabolol |
| | q.s. | Preservative |
| | q.s. | Perfume oil |
| D | 3.0 | Polyquaternium-44 |
| | 0.5 | Cocotrimonium Methosulfate |
| | 0.5 | Ceteareth-25 |
| | 2.0 | Panthenol, Propylene Glycol |
| | 4.0 | Propylene Glycol |
| | 0.1 | Disodium EDTA |
| | 5.0 | Aqueous solution with about 5% fusion protein-KBD |
| | 56.7 | Aqua dem. |

Preparation: Dissolve phase A. Stir phase B into phase A. Incorporate phase C into the combined phases A and B. Dissolve phase D, stir into the combined phases A, B and C and homogenize. After-stir for 15 min.

### Example 26

### Use of the KBD in a Daily Care Body Spray

| | |
|---|---|
| % | Ingredient (INCI) |

Al 1%:

| | | |
|---|---|---|
| A | 3.0 | Ethylhexyl Methoxycinnamate |
| | 2.0 | Diethylamino Hydroxybenzoyl Hexyl Benzoate |
| | 1.0 | Polyquaternium-44 |
| | 3.0 | Propylene Glycol |
| | 2.0 | Panthenol, Propylene Glycol |
| | 1.0 | Cyclopentasiloxane, Cyclohexasiloxane |
| | 10.0 | Octyldodecanol |
| | 0.5 | PVP |
| | 10.0 | Caprylic/Capric Triglyceride |
| | 3.0 | C12-15 Alkyl Benzoate |
| | 3.0 | Glycerin |
| | 1.0 | Tocopheryl Acetate |
| | 0.3 | Bisabolol |
| | 1.0 | Aqueous solution with about 5% fusion protein-KBD |
| | 59.2 | Alcohol |

Al 5%:

| | | |
|---|---|---|
| A | 3.0 | Ethylhexyl Methoxycinnamate |
| | 2.0 | Diethylamino Hydroxybenzoyl Hexyl Benzoate |
| | 1.0 | Polyquaternium-44 |
| | 3.0 | Propylene Glycol |
| | 2.0 | Panthenol, Propylene Glycol |
| | 1.0 | Cyclopentasiloxane, Cyclohexasiloxane |
| | 10.0 | Octyldodecanol |
| | 0.5 | PVP |
| | 10.0 | Caprylic/Capric Triglyceride |
| | 3.0 | C12-15 Alkyl Benzoate |
| | 3.0 | Glycerin |
| | 1.0 | Tocopheryl Acetate |
| | 0.3 | Bisabolol |
| | 5.0 | Aqueous solution with about 5% fusion protein-KBD |
| | 55.2 | Alcohol |

Preparation: Weigh in the components of phase A and dissolve until clear.

### Example 27

### Use of the KBD in a Skin Care Gel

| | |
|---|---|
| % | Ingredient (INCI) |

Al 1%:

| | | |
|---|---|---|
| A | 3.6 | PEG-40 Hydrogenated Castor Oil |
| | 15.0 | Alcohol |
| | 0.1 | Bisabolol |
| | 0.5 | Tocopheryl Acetate |
| | q.s. | Perfume oil |
| B | 3.0 | Panthenol |
| | 0.6 | Carbomer |
| | 1.0 | Aqueous solution with about 5% fusion protein-KBD |
| | 75.4 | Aqua dem. |
| C | 0.8 | Triethanolamine |

Al 5%:

| | | |
|---|---|---|
| A | 3.6 | PEG-40 Hydrogenated Castor Oil |
| | 15.0 | Alcohol |
| | 0.1 | Bisabolol |
| | 0.5 | Tocopheryl Acetate |
| | q.s. | Perfume oil |
| B | 3.0 | Panthenol |
| | 0.6 | Carbomer |
| | 5.0 | Aqueous solution with about 5% fusion protein-KBD |
| | 71.4 | Aqua dem. |
| C | 0.8 | Triethanolamine |

Preparation: Dissolve phase A until clear. Allow phase B to swell and neutralize with phase C. Stir phase A into the homogenized phase B and homogenize.

[0796] Example 28

### Use of the KBD in an Aftershave Lotion

| | |
|---|---|
| % | Ingredient (INCI) |

Al 1%:

| | | |
|---|---|---|
| A | 10.0 | Cetearyl Ethylhexanoate |
| | 5.0 | Tocopheryl Acetate |
| | 1.0 | Bisabolol |
| | 0.1 | Perfume oil |
| | 0.3 | Acrylates/C10-30 Alkyl Acrylate Crosspolymer |
| B | 15.0 | Alcohol |
| | 1.0 | Panthenol |
| | 3.0 | Glycerin |
| | 1.0 | Aqueous solution with about 5% fusion protein-KBD |
| | 0.1 | Triethanolamine |
| | 63.5 | Aqua dem. |

Al 5%:

| | | |
|---|---|---|
| A | 10.0 | Cetearyl Ethylhexanoate |
| | 5.0 | Tocopheryl Acetate |
| | 1.0 | Bisabolol |
| | 0.1 | Perfume oil |
| | 0.3 | Acrylates/C10-30 Alkyl Acrylate Crosspolymer |
| B | 15.0 | Alcohol |
| | 1.0 | Panthenol |
| | 3.0 | Glycerin |
| | 5.0 | Aqueous solution with about 5% fusion protein-KBD |
| | 0.1 | Triethanolamine |
| | 59.5 | Aqua dem. |

Preparation: Mix the components of phase A. Dissolve phase B, incorporate into phase A and homogenize.

### Example 29

### Use of the KBD in an Aftersun Lotion

| | |
|---|---|
| % | Ingredient (INCI) |

Al 1%:

| | | |
|---|---|---|
| A | 0.4 | Acrylates/C10-30 Alkyl Acrylate Crosspolymer |
| | 15.0 | Cetearyl Ethylhexanoate |
| | 0.2 | Bisabolol |
| | 1.0 | Tocopheryl Acetate |
| | q.s. | Perfume oil |
| B | 1.0 | Panthenol |
| | 15.0 | Alcohol |
| | 3.0 | Glycerin |
| | 1.0 | Aqueous solution with about 5% fusion protein-KBD |
| | 63.2 | Aqua dem. |
| C | 0.2 | Triethanolamine |

Al 5%:

| | | |
|---|---|---|
| A | 0.4 | Acrylates/C10-30 Alkyl Acrylate Crosspolymer |
| | 15.0 | Cetearyl Ethylhexanoate |
| | 0.2 | Bisabolol |
| | 1.0 | Tocopheryl Acetate |
| | q.s. | Perfume oil |
| B | 1.0 | Panthenol |
| | 15.0 | Alcohol |
| | 3.0 | Glycerin |
| | 5.0 | Aqueous solution with about 5% fusion protein-KBD |
| | 59.2 | Aqua dem. |
| C | 0.2 | Triethanolamine |

Preparation: Mix the components of phase A. Stir phase B into phase A with homogenization. Neutralize with phase C and homogenize again.

### Example 30

### Use of the KBD in a Sunscreen Lotion A

| | |
|---|---|
| % | Ingredient (INCI) |

Al 1%:

| | | |
|---|---|---|
| A | 4.5 | Ethylhexyl Methoxycinnamate |
| | 2.0 | Diethylamino Hydroxybenzoyl Hexyl Benzoate |
| | 3.0 | Octocrylene |
| | 2.5 | Di-C12-13 Alkyl Malate |
| | 0.5 | Tocopheryl Acetate |
| | 4.0 | Polyglyceryl-3 Methyl Glucose Distearate |
| B | 3.5 | Cetearyl Isononanoate |
| | 1.0 | VP/Eicosene Copolymer |
| | 5.0 | Isohexadecane |
| | 2.5 | Di-C12-13 Alkyl Malate |
| | 3.0 | Titanium Dioxide, Trimethoxycaprylylsilane |
| C | 5.0 | Glycerin |
| | 1.0 | Sodium Cetearyl Sulfate |
| | 0.5 | Xanthan Gum |
| | 59.7 | Aqua dem. |
| D | 1.0 | Aqueous solution with about 5% fusion protein-KBD |
| | 1.0 | Phenoxyethanol, Methylparaben, Ethylparaben, Butylparaben, |
| | | Propyl-paraben, Isobutylparaben |
| | 0.3 | Bisabolol |

Al 5%:

| | | |
|---|---|---|
| A | 4.5 | Ethylhexyl Methoxycinnamate |
| | 2.0 | Diethylamino Hydroxybenzoyl Hexyl Benzoate |
| | 3.0 | Octocrylene |
| | 2.5 | Di-C12-13 Alkyl Malate |
| | 0.5 | Tocopheryl Acetate |
| | 4.0 | Polyglyceryl-3 Methyl Glucose Distearate |
| B | 3.5 | Cetearyl Isononanoate |
| | 1.0 | VP/Eicosene Copolymer |
| | 5.0 | Isohexadecane |
| | 2.5 | Di-C12-13 Alkyl Malate |
| | 3.0 | Titanium Dioxide, Trimethoxycaprylylsilane |
| C | 5.0 | Glycerin |
| | 1.0 | Sodium Cetearyl Sulfate |
| | 0.5 | Xanthan Gum |
| | 55.7 | Aqua dem. |
| D | 5.0 | Aqueous solution with about 5% fusion protein-KBD |
| | 1.0 | Phenoxyethanol, Methylparaben, Ethylparaben, Butylparaben, |
| | | Propyl-paraben, Isobutylparaben |
| | 0.3 | Bisabolol |

Preparation: Heat the components of phases A and B separately from one another to about 80° C.. Stir phase B into phase A and homogenize. Heat phase C to about 80° C. and stir into the combined phases A and B with homogenization. Cool to about 40° C. with stirring, add phase D and homogenize again.

### Example 31

### Use of the KBD in a Sunscreen Lotion—O/W Type

| | |
|---|---|
| % | Ingredient (INCI) |

Al 1%:

| | | |
|---|---|---|
| A | 2.0 | Ceteareth-6, Stearyl Alcohol |
| | 2.0 | Ceteareth-25 |
| | 3.0 | Tribehenin |
| | 2.0 | Cetearyl Alcohol |
| | 2.0 | Cetearyl Ethylhexanoate |
| | 5.0 | Ethylhexyl Methoxycinnamate |
| | 1.0 | Ethylhexyl Triazone |
| | 1.0 | VP/Eicosene Copolymer |
| | 7.0 | Isopropyl Myristate |
| B | 5.0 | Zinc Oxide, Triethoxycaprylylsilane |
| C | 0.2 | Xanthan Gum |
| | 0.5 | Hydroxyethyl Acrylate/Sodium Acryloyldimethyl Taurate |
| | | Copolymer, Squalane, Polysorbate 60 |
| | 0.2 | Disodium EDTA |
| | 5.0 | Propylene Glycol |
| | 0.5 | Panthenol |
| | 60.9 | Aqua dem. |
| D | 1.0 | Aqueous solution with about 5% fusion protein-KBD |
| | 0.5 | Phenoxyethanol, Methylparaben, Butylparaben, Ethylparaben, |
| | | Propyl-paraben, Isopropylparaben |
| | 1.0 | Tocopheryl Acetate |
| | 0.2 | Bisabolol |

Al 5%:

| | | |
|---|---|---|
| A | 2.0 | Ceteareth-6, Stearyl Alcohol |
| | 2.0 | Ceteareth-25 |
| | 3.0 | Tribehenin |
| | 2.0 | Cetearyl Alcohol |
| | 2.0 | Cetearyl Ethylhexanoate |
| | 5.0 | Ethylhexyl Methoxycinnamate |
| | 1.0 | Ethylhexyl Triazone |
| | 1.0 | VP/Eicosene Copolymer |
| | 7.0 | Isopropyl Myristate |
| B | 5.0 | Zinc Oxide, Triethoxycaprylylsilane |
| C | 0.2 | Xanthan Gum |
| | 0.5 | Hydroxyethyl Acrylate/Sodium Acryloyldimethyl Taurate |
| | | Copolymer, Squalane, Polysorbate 60 |
| | 0.2 | Disodium EDTA |
| | 5.0 | Propylene Glycol |
| | 0.5 | Panthenol |
| | 56.9 | Aqua dem. |
| D | 5.0 | Aqueous solution with about 5% fusion protein-KBD |
| | 0.5 | Phenoxyethanol, Methylparaben, Butylparaben, |
| | | Ethylparaben, Propylparaben, Isopropylparaben |
| | 1.0 | Tocopheryl Acetate |
| | 0.2 | Bisabolol |

Preparation: Heat phase A to about 80° C., stir in phase B and homogenize for 3 min. Likewise heat phase C to 80° C. and stir into the combined phases A and B with homogenization. Cool to about 40° C., stir in phase D and homogenize again.

### Example 32

### Use of the KBD in a Sunscreen Lotion—O/W Type

| | |
|---|---|
| % | Ingredient (INCI) |

Al 1%:

| | | |
|---|---|---|
| A | 3.5 | Ceteareth-6, Stearyl Alcohol |
| | 1.5 | Ceteareth-25 |
| | 7.5 | Ethylhexyl Methoxycinnamate |
| | 2.0 | Diethylamino Hydroxybenzoyl Hexyl Benzoate |
| | 2.0 | Cyclopentasiloxane, Cyclohexasiloxane |
| | 0.5 | Beeswax |
| | 3.0 | Cetearyl Alcohol |
| | 10.0 | Caprylic/Capric Triglyceride |
| B | 5.0 | Titanium Dioxide, Silica, Methicone, Alumina |
| C | 3.0 | Glycerin |
| | 0.2 | Disodium EDTA |
| | 0.3 | Xanthan Gum |
| | 1.0 | Decyl Glucoside |
| | 2.0 | Panthenol, Propylene Glycol |
| | 56.3 | Aqua dem. |
| D | 1.0 | Aqueous solution with about 5% fusion protein-KBD |
| | 1.0 | Tocopheryl Acetate |
| | 0.2 | Bisabolol |
| | q.s. | Perfume oil |
| | q.s. | Preservative |

Al 5%:

| | | |
|---|---|---|
| A | 3.5 | Ceteareth-6, Stearyl Alcohol |
| | 1.5 | Ceteareth-25 |
| | 7.5 | Ethylhexyl Methoxycinnamate |
| | 2.0 | Diethylamino Hydroxybenzoyl Hexyl Benzoate |
| | 2.0 | Cyclopentasiloxane, Cyclohexasiloxane |
| | 0.5 | Beeswax |
| | 3.0 | Cetearyl Alcohol |
| | 10.0 | Caprylic/Capric Triglyceride |
| B | 5.0 | Titanium Dioxide, Silica, Methicone, Alumina |
| C | 3.0 | Glycerin |
| | 0.2 | Disodium EDTA |
| | 0.3 | Xanthan Gum |
| | 1.0 | Decyl Glucoside |
| | 2.0 | Panthenol, Propylene Glycol |
| | 52.3 | Aqua dem. |
| D | 5.0 | Aqueous solution with about 5% fusion protein-KBD |
| | 1.0 | Tocopheryl Acetate |
| | 0.2 | Bisabolol |
| | q.s. | Perfume oil |
| | q.s. | Preservative |

Preparation: Heat phase A to about 80° C., stir in phase B and homogenize for 3 min. Likewise heat phase C to 80° C. and stir into the combined phases A and B with homogenization. Cool to about 40° C., stir in phase D and homogenize again.

### Example 33

### Use of the KBD in a Foot Balsam

| | |
|---|---|
| % | Ingredient (INCI) |

Al 1%:

| | | |
|---|---|---|
| A | 2.0 | Ceteareth-6, Stearyl Alcohol |
| | 2.0 | Ceteareth-25 |
| | 5.0 | Cetearyl Ethylhexanoate |
| | 4.0 | Cetyl Alcohol |
| | 4.0 | Glyceryl Stearate |
| | 5.0 | Mineral Oil |
| | 0.2 | Menthol |
| | 0.5 | Camphor |
| B | 69.3 | Aqua dem. |
| | q.s. | Preservative |
| C | 1.0 | Bisabolol |
| | 1.0 | Tocopheryl Acetate |
| D | 1.0 | Aqueous solution with about 5% fusion protein-KBD |
| | 5.0 | Witch Hazel Extract |

Al 5%:

| | | |
|---|---|---|
| A | 2.0 | Ceteareth-6, Stearyl Alcohol |
| | 2.0 | Ceteareth-25 |
| | 5.0 | Cetearyl Ethylhexanoate |
| | 4.0 | Cetyl Alcohol |
| | 4.0 | Glyceryl Stearate |
| | 5.0 | Mineral Oil |
| | 0.2 | Menthol |
| | 0.5 | Camphor |
| B | 65.3 | Aqua dem. |
| | q.s. | Preservative |
| C | 1.0 | Bisabolol |
| | 1.0 | Tocopheryl Acetate |
| D | 5.0 | Aqueous solution with about 5% fusion protein-KBD |
| | 5.0 | Witch Hazel Extract |

Preparation: Heat the components of phases A and B separately from one another to about 80° C.. Stir phase B into phase A with homogenization. Cool to about 40° C. with stirring, add phases C and D and briefly after-homogenize. Cool to room temperature with stirring.

### Example 34

### Use of the KBD in a W/O Emulsion with Bisabolol

| | |
|---|---|
| % | Ingredient (INCI) |

Al 1%:

| | | |
|---|---|---|
| A | 6.0 | PEG-7 Hydrogenated Castor Oil |
| | 8.0 | Cetearyl Ethylhexanoate |
| | 5.0 | Isopropyl Myristate |
| | 15.0 | Mineral Oil |
| | 0.3 | Magnesium Stearate |
| | 0.3 | Aluminum Stearate |
| | 2.0 | PEG-45/Dodecyl Glycol Copolymer |
| B | 5.0 | Glycerin |
| | 0.7 | Magnesium Sulfate |
| | 55.6 | Aqua dem. |
| C | 1.0 | Aqueous solution with about 5% fusion protein-KBD |
| | 0.5 | Tocopheryl Acetate |
| | 0.6 | Bisabolol |

Al 5%:

| | | |
|---|---|---|
| A | 6.0 | PEG-7 Hydrogenated Castor Oil |
| | 8.0 | Cetearyl Ethylhexanoate |
| | 5.0 | Isopropyl Myristate |
| | 15.0 | Mineral Oil |
| | 0.3 | Magnesium Stearate |
| | 0.3 | Aluminum Stearate |
| | 2.0 | PEG-45/Dodecyl Glycol Copolymer |
| B | 5.0 | Glycerin |
| | 0.7 | Magnesium Sulfate |
| | 51.6 | Aqua dem. |
| C | 5.0 | Aqueous solution with about 5% fusion protein-KBD |
| | 0.5 | Tocopheryl Acetate |

Preparation: Heat phases A and B separately from one another to about 85° C.. Stir phase B into phase A and homogenize. Cool to about 40° C. with stirring, add phase C and briefly homogenize again. Cool to room temperature with stirring.
List of formulations for patent keratin-binding domain - hair care

### Example 35

### Foam Conditioner with Setting Agent

| | |
|---|---|
| % | Ingredient (INCI) |

Al 1%

| | | |
|---|---|---|
| A | 10.0 | PVP/VA Copolymer |
| | 0.2 | Hydroxyethyl Cetyldimonium Phosphate |
| | 0.2 | Ceteareth-25 |
| | 0.5 | Dimethicone Copolyol |
| | q.s. | Perfume oil |
| | 10.0 | Alcohol |
| | 1.0 | Aqueous solution with about 5% fusion protein-KBD |
| | 68.1 | Aqua dem. |
| | 10.0 | Propane/Butane |

Al 5%

| | | |
|---|---|---|
| A | 10.0 | PVP/VA Copolymer |
| | 0.2 | Hydroxyethyl Cetyldimonium Phosphate |
| | 0.2 | Ceteareth-25 |
| | 0.5 | Dimethicone Copolyol |
| | q.s. | Perfume oil |
| | 10.0 | Alcohol |
| | 5.0 | Aqueous solution with about 5% fusion protein-KBD |
| | 64.1 | Aqua dem. |
| | 10.0 | Propane/Butane |

Preparation: Weigh the components of phase A together, stir until everything has dissolved and bottle.

### Example 36

### Foam Conditioner

| | |
|---|---|
| % | Ingredient (INCI) |

Al 1%

| | | |
|---|---|---|
| A | 1.0 | Polyquaternium-4 |
| | 0.5 | Hydroxyethyl Cetyldimonium Phosphate |
| | 1.0 | Aqueous solution with about 5% fusion protein-KBD |
| | q.s. | Perfume oil |
| | q.s. | Preservative |
| | 91.5 | Aqua dem. |
| | 6.0 | Propane/Butane |

Al 5%

| | | |
|---|---|---|
| A | 1.0 | Polyquaternium-4 |
| | 0.5 | Hydroxyethyl Cetyldimonium Phosphate |
| | 5.0 | Aqueous solution with about 5% fusion protein-KBD |
| | q.s. | Perfume oil |
| | q.s. | Preservative |
| | 87.5 | Aqua dem. |
| | 6.0 | Propane/Butane |

Preparation: Weigh the components of phase A together, stir until everything has dissolved to give a clear solution and bottle.

### Example 37

### Foam Conditioner

| | |
|---|---|
| % | Ingredient (INCI) |

Al 1%

| | | |
|---|---|---|
| A | 1.0 | Polyquaternium-11 |
| | 0.5 | Hydroxyethyl Cetyldimonium Phosphate |
| | 1.0 | Aqueous solution with about 5% fusion protein-KBD |
| | q.s. | Perfume oil |
| | q.s. | Preservative |
| | 91.5 | Aqua dem. |
| | 6.0 | Propane/Butane |

Al 5%

| | | |
|---|---|---|
| A | 1.0 | Polyquaternium-11 |
| | 0.5 | Hydroxyethyl Cetyldimonium Phosphate |
| | 5.0 | Aqueous solution with about 5% fusion protein-KBD |
| | q.s. | Perfume oil |
| | q.s. | Preservative |
| | 87.5 | Aqua dem. |
| | 6.0 | Propane/Butane |

Preparation: Weight the components of phase A together, stir until everything has dissolved to give a clear solution and bottle.

### Example 38

### Styling Foam

| | |
|---|---|
| % | Ingredient (INCI) |

Al 1%

| | | |
|---|---|---|
| A | 0.5 | Laureth-4 |
| | q.s. | Perfume oil |
| B | 77.3 | Aqua dem. |
| | 10.0 | Polyquaternium-28 |
| | 1.0 | Aqueous solution with about 5% fusion protein-KBD |
| | 0.5 | Dimethicone Copolyol |
| | 0.2 | Ceteareth-25 |
| | 0.2 | Panthenol |
| | 0.1 | PEG-25 PABA |
| | 0.2 | Hydroxyethylcellulose |
| C | 10.0 | HFC 152 A |

Al 5%

| | | |
|---|---|---|
| A | 0.5 | Laureth-4 |
| | q.s. | Perfume oil |
| B | 73.3 | Aqua dem. |
| | 10.0 | Polyquaternium-28 |
| | 5.0 | Aqueous solution with about 5% fusion protein-KBD |
| | 0.5 | Dimethicone Copolyol |
| | 0.2 | Ceteareth-25 |
| | 0.2 | Panthenol |
| | 0.1 | PEG-25 PABA |
| | 0.2 | Hydroxyethylcellulose |
| C | 10.0 | HFC 152 A |

Preparation: Mix the components of phase A. Add the components of phase B one after the other and dissolve. Bottle with phase C.

### Example 39

### Styling Foam

| | |
|---|---|
| % | Ingredient (INCI) |

Al 1%

| | | |
|---|---|---|
| A | 2.0 | Cocotrimonium Methosulfate |
| | q.s. | Perfume oil |
| B | 78.5 | Aqua dem. |
| | 6.7 | Acrylates Copolymer |
| | 0.6 | AMP |
| | 1.0 | Aqueous solution with about 5% fusion protein-KBD |
| | 0.5 | Dimethicone Copolyol |
| | 0.2 | Ceteareth-25 |
| | 0.2 | Panthenol |
| | 0.1 | PEG-25 PABA |
| | 0.2 | Hydroxyethylcellulose |
| C | 10.0 | HFC 152 A |

Al 5%

| | | |
|---|---|---|
| A | 2.0 | Cocotrimonium Methosulfate |
| | q.s. | Perfume oil |
| B | 74.5 | Aqua dem. |
| | 6.7 | Acrylates Copolymer |
| | 0.6 | AMP |
| | 5.0 | Aqueous solution with about 5% fusion protein-KBD |
| | 0.5 | Dimethicone Copolyol |
| | 0.2 | Ceteareth-25 |
| | 0.2 | Panthenol |
| | 0.1 | PEG-25 PABA |
| | 0.2 | Hydroxyethylcellulose |
| C | 10.0 | HFC 152 A |

Preparation: Mix the components of phase A. Add the components of phase B one after the other and dissolve. Bottle with phase C.

### Example 40

### Styling Foam

| | |
|---|---|
| % | Ingredient (INCI) |

Al 1%

| | | |
|---|---|---|
| A | 2.0 | Cocotrimonium Methosulfate |
| | q.s. | Perfume oil |
| B | 7.70 | Polyquaternium-44 |
| | 1.0 | Aqueous solution with about 5% fusion protein-KBD |
| | q.s. | Preservative |
| | 79.3 | Aqua dem. |
| C | 10.0 | Propane/Butane |

Al 5%

| | | |
|---|---|---|
| A | 2.0 | Cocotrimonium Methosulfate |
| | q.s. | Perfume oil |
| B | 7.70 | Polyquaternium-44 |
| | 5.0 | Aqueous solution with about 5% fusion protein-KBD |
| | q.s. | Preservative |
| | 75.3 | Aqua dem. |
| C | 10.0 | Propane/Butane |

Preparation: Mix the components of phase A. Dissolve the components of phase B until clear, then stir phase B into phase A. Adjust the pH to 6-7, bottle with phase C.

### Example 41

### Styling Foam

| | |
|---|---|
| % | Ingredient (INCI) |

Al 1%

| | | |
|---|---|---|
| A | 2.00 | Cocotrimonium Methosulfate |
| | q.s. | Perfume oil |
| B | 72.32 | Aqua dem. |
| | 2.00 | VP/Acrylates/Lauryl Methacrylate Copolymer |
| | 0.53 | AMP |
| | 1.00 | Aqueous solution with about 5% fusion protein-KBD |
| | 0.20 | Ceteareth-25 |
| | 0.50 | Panthenol |
| | 0.05 | Benzophenone-4 |
| | 0.20 | Amodimethicone, Cetrimonium Chloride, Trideceth-12 |
| | 15.00 | Alcohol |
| C | 0.20 | Hydroxyethylcellulose |
| D | 6.00 | Propane/Butane |

Al 5%

| | | |
|---|---|---|
| A | 2.00 | Cocotrimonium Methosulfate |
| | q.s. | Perfume oil |
| B | 68.32 | Aqua dem. |
| | 2.00 | VP/Acrylates/Lauryl Methacrylate Copolymer |
| | 0.53 | AMP |
| | 5.00 | Aqueous solution with about 5% fusion protein-KBD |
| | 0.20 | Ceteareth-25 |
| | 0.50 | Panthenol |
| | 0.05 | Benzophenone-4 |
| | 0.20 | Amodimethicone, Cetrimonium Chloride, Trideceth-12 |
| | 15.00 | Alcohol |
| C | 0.20 | Hydroxyethylcellulose |
| D | 6.00 | Propane/Butane |

Preparation: Mix the components of phase A. Add the components of phase B one after the other and dissolve. Dissolve phase C in the mixture of A and B, then adjust the pH to 6-7. Bottle with phase D.

### Example 42

### Styling Foam

| | |
|---|---|
| % | Ingredient (INCI) |

Al 1%

| | | |
|---|---|---|
| A | 2.00 | Cetrimonium Chloride |
| | q.s. | Perfume oil |
| B | 67.85 | Aqua dem. |
| | 7.00 | Polyquaternium-46 |
| | 1.00 | Aqueous solution with about 5% fusion protein-KBD |
| | 0.20 | Ceteareth-25 |
| | 0.50 | Panthenol |
| | 0.05 | Benzophenone-4 |
| | 0.20 | Amodimethicone, Cetrimonium Chloride, Trideceth-12 |
| | 15.00 | Alcohol |
| C | 0.20 | Hydroxyethylcellulose |
| D | 6.00 | Propane/Butane |

Al 5%

| | | |
|---|---|---|
| A | 2.00 | Cetrimonium Chloride |
| | q.s. | Perfume oil |
| B | 63.85 | Aqua dem. |
| | 7.00 | Polyquaternium-46 |
| | 5.00 | Aqueous solution with about 5% fusion protein-KBD |
| | 0.20 | Ceteareth-25 |
| | 0.50 | Panthenol |
| | 0.05 | Benzophenone-4 |
| | 0.20 | Amodimethicone, Cetrimonium Chloride, Trideceth-12 |
| | 15.00 | Alcohol |
| C | 0.20 | Hydroxyethylcellulose |
| D | 6.00 | Propane/Butane |

Preparation: Mix the components of phase A. Add the components of phase B one after the other and dissolve. Dissolve phase C in the mixture of A and B, then adjust the pH to 6-7. Bottle with phase D.

### Example 43

### Styling Foam

| | |
|---|---|
| % | Ingredient (INCI) |

Al 1%

| | | |
|---|---|---|
| A | q.s. | PEG-40 Hydrogenated Castor Oil |
| | q.s. | Perfume oil |
| | 85.5 | Aqua dem. |
| B | 7.0 | Sodium Polystyrene Sulfonate |
| | 1.0 | Aqueous solution with about 5% fusion protein-KBD |
| | 0.5 | Cetrimonium Bromide |
| | q.s. | Preservative |
| C | 6.0 | Propane/Butane |

Styling foam
Al 5%

| | | |
|---|---|---|
| A | q.s. | PEG-40 Hydrogenated Castor Oil |
| | q.s. | Perfume oil |
| | 81.5 | Aqua dem. |
| B | 7.0 | Sodium Polystyrene Sulfonate |
| | 5.0 | Aqueous solution with about 5% fusion protein-KBD |
| | 0.5 | Cetrimonium Bromide |
| | q.s. | Preservative |
| C | 6.0 | Propane/Butane |

Preparation: Solubilize phase A. Weigh phase B into phase A and dissolve until clear. Adjust the pH to 6-7, bottle with phase C.

### Example 40

### Styling Foam

| | |
|---|---|
| % | Ingredient (INCI) |

Al 1%

| | | |
|---|---|---|
| A | q.s. | PEG-40 Hydrogenated Castor Oil |
| | q.s. | Perfume oil |
| | 92.0 | Aqua dem. |
| B | 0.5 | Polyquaternium-10 |
| | 1.0 | Aqueous solution with about 5% fusion protein-KBD |
| | 0.5 | Cetrimonium Bromide |
| | q.s. | Preservative |
| C | 6.0 | Propane/Butane |

Al 5%

| | | |
|---|---|---|
| A | q.s. | PEG-40 Hydrogenated Castor Oil |
| | q.s. | Perfume oil |
| | 88.0 | Aqua dem. |
| B | 0.5 | Polyquaternium-10 |
| | 5.0 | Aqueous solution with about 5% fusion protein-KBD |
| | 0.5 | Cetrimonium Bromide |
| | q.s. | Preservative |
| C | 6.0 | Propane/Butane |

Preparation: Solubilize phase A. Weigh phase B into phase A and dissolve until clear. Adjust the pH to 6-7, bottle with phase C.

### Example 44

### Styling Foam

| | |
|---|---|
| % | Ingredient (INCI) |

Al 1%

| | | |
|---|---|---|
| A | q.s. | PEG-40 Hydrogenated Castor Oil |
| | q.s. | Perfume oil |
| | 82.5 | Aqua dem. |
| B | 10.0 | Polyquaternium-16 |
| | 1.0 | Aqueous solution with about 5% fusion protein-KBD |
| | 0.5 | Hydroxyethyl Cetyldimonium Phosphate |
| | q.s. | Preservative |
| C | 6.0 | Propane/Butane |

Al 5%

| | | |
|---|---|---|
| A | q.s. | PEG-40 Hydrogenated Castor Oil |
| | q.s. | Perfume oil |
| | 78.5 | Aqua dem. |
| B | 10.0 | Polyquaternium-16 |
| | 5.0 | Aqueous solution with about 5% fusion protein-KBD |
| | 0.5 | Hydroxyethyl Cetyldimonium Phosphate |
| | q.s. | Preservative |
| C | 6.0 | Propane/Butane |

Preparation: Solubilize phase A. Weigh phase B into phase A and dissolve until clear. Adjust the pH to 6-7, bottle with phase C.

### Example 45

### Styling Foam

| | |
|---|---|
| % | Ingredient (INCI) |

Al 1%

| | | |
|---|---|---|
| A | 2.0 | Cocotrimonium Methosulfate |
| | q.s. | Perfume oil |
| B | 84.0 | Aqua dem. |
| | 2.0 | Chitosan |
| | 1.0 | Aqueous solution with about 5% fusion protein-KBD |
| | 0.5 | Dimethicone Copolyol |
| | 0.2 | Ceteareth-25 |
| | 0.2 | Panthenol |
| | 0.1 | PEG-25 PABA |
| C | 10.0 | HFC 152 A |

Al 5%

| | | |
|---|---|---|
| A | 2.0 | Cocotrimonium Methosulfate |
| | q.s. | Perfume oil |
| B | 80.0 | Aqua dem. |
| | 2.0 | Chitosan |
| | 5.0 | Aqueous solution with about 5% fusion protein-KBD |
| | 0.5 | Dimethicone Copolyol |
| | 0.2 | Ceteareth-25 |
| | 0.2 | Panthenol |
| | 0.1 | PEG-25 PABA |
| C | 10.0 | HFC I52 A |

Preparation: Mix the components of phase A. Add the components of phase B one after the other and dissolve. Bottle with phase C.

### Example 46

### Care Shampoo

| | |
|---|---|
| % | Ingredient (INCI) |

Al 1%

| | | |
|---|---|---|
| A | 30.0 | Sodium Laureth Sulfate |
| | 6.0 | Sodium Cocoamphoacetate |
| | 6.0 | Cocamidopropyl Betaine |
| | 3.0 | Sodium Laureth Sulfate, Glycol Distearate, Cocamide MEA, |
| | | Laureth-10 |
| | 1.0 | Aqueous solution with about 5% fusion protein-KBD |
| | 7.7 | Polyquaternium-44 |
| | 2.0 | Amodimethicone |
| | q.s. | Perfume oil |
| | q.s. | Preservative |
| | 1.0 | Sodium Chloride |
| | 43.3 | Aqua dem. |
| B | q.s. | Citric Acid |

Al 5%

| | | |
|---|---|---|
| A | 30.0 | Sodium Laureth Sulfate |
| | 6.0 | Sodium Cocoamphoacetate |
| | 6.0 | Cocamidopropyl Betaine |
| | 3.0 | Sodium Laureth Sulfate, Glycol Distearate, Cocamide MEA, |
| | | Laureth-10 |
| | 5.0 | Aqueous solution with about 5% fusion protein-KBD |
| | 7.7 | Polyquaternium-44 |
| | 2.0 | Amodimethicone |
| | q.s. | Perfume oil |
| | q.s. | Preservative |
| | 1.0 | Sodium Chloride |
| | 39.3 | Aqua dem. |
| B | q.s. | Citric Acid |

Preparation: Mix the components of phase A and dissolve. Adjust the pH to 6-7 with citric acid.

### Example 47

### Shower Gel

| | |
|---|---|
| % | Ingredient (INCI) |

Al 1%

| | | |
|---|---|---|
| A | 40.0 | Sodium Laureth Sulfate |
| | 5.0 | Decyl Glucoside |
| | 5.0 | Cocamidopropyl Betaine |
| | 1.0 | Aqueous solution with about 5% fusion protein-KBD |
| | 1.0 | Panthenol |
| | q.s. | Perfume oil |
| | q.s. | Preservative |
| | 2.0 | Sodium Chloride |
| | 46.0 | Aqua dem. |
| B | q.s. | Citric Acid |

Al 5%

| | | |
|---|---|---|
| A | 40.0 | Sodium Laureth Sulfate |
| | 5.0 | Decyl Glucoside |
| | 5.0 | Cocamidopropyl Betaine |
| | 5.0 | Aqueous solution with about 5% fusion protein-KBD |
| | 1.0 | Panthenol |
| | q.s. | Perfume oil |
| | q.s. | Preservative |
| | 2.0 | Sodium Chloride |
| | 42.0 | Aqua dem. |
| B | q.s. | Citric Acid |

Preparation: Mix the components of phase A and dissolve. Adjust the pH to 6-7 with citric acid.

### Example 48

### Shampoo

| | |
|---|---|
| % | Ingredient (INCI) |

Al 1%

| | | |
|---|---|---|
| A | 40.0 | Sodium Laureth Sulfate |
| | 5.0 | Sodium C12-15 Pareth-15 Sulfonate |
| | 5.0 | Decyl Glucoside |
| | q.s. | Perfume oil |
| | 0.1 | Phytantriol |
| | 44.6 | Aqua dem. |
| | 1.0 | Aqueous solution with about 5% fusion protein-KBD |
| | 0.3 | Polyquaternium-10 |
| | 1.0 | Panthenol |
| | q.s. | Preservative |
| | 1.0 | Laureth-3 |
| | 2.0 | Sodium Chloride |

Al 5%

| | | |
|---|---|---|
| A | 40.0 | Sodium Laureth Sulfate |
| | 5.0 | Sodium C12-15 Pareth-15 Sulfonate |
| | 5.0 | Decyl Glucoside |
| | q.s. | Perfume oil |
| | 0.1 | Phytantriol |
| | 40.6 | Aqua dem. |
| | 5.0 | Aqueous solution with about 5% fusion protein-KBD |
| | 0.3 | Polyquaternium-10 |
| | 1.0 | Panthenol |
| | q.s. | Preservative |
| | 1.0 | Laureth-3 |
| | 2.0 | Sodium Chloride |

Preparation: Mix the components of phase A and dissolve. Adjust the pH to 6-7 with citric acid.

### Example 49

### Shampoo

| | |
|---|---|
| % | Ingredient (INCI) |

Al 1%

| | | |
|---|---|---|
| A | 15.00 | Cocamidopropyl Betaine |
| | 10.00 | Disodium Cocoamphodiacetate |
| | 5.00 | Polysorbate 20 |
| | 5.00 | Decyl Glucoside |
| | q.s. | Perfume oil |
| | q.s. | Preservative |
| | 1.00 | Aqueous solution with about 5% fusion protein-KBD |
| | 0.15 | Guar Hydroxypropyltrimonium Chloride |
| | 2.00 | Laureth-3 |
| | 58.00 | Aqua dem. |
| | q.s. | Citric Acid |
| B | 3.00 | PEG-150 Distearate |

Al 5%

| | | |
|---|---|---|
| A | 15.00 | Cocamidopropyl Betaine |
| | 10.00 | Disodium Cocoamphodiacetate |
| | 5.00 | Polysorbate 20 |
| | 5.00 | Decyl Glucoside |
| | q.s. | Perfume oil |
| | q.s. | Preservative |
| | 5.00 | Aqueous solution with about 5% fusion protein-KBD |
| | 0.15 | Guar Hydroxypropyltrimonium Chloride |
| | 2.00 | Laureth-3 |
| | 54.00 | Aqua dem. |
| | q.s. | Citric Acid |
| B | 3.00 | PEG-150 Distearate |

Preparation: Weigh in the components of phase A and dissolve. Adjust the pH to 6-7. Add phase B and heat to about 50° C. Cool to room temperature with stirring.

### Example 50

### Moisturizing Body Care Cream

| | |
|---|---|
| % | Ingredient (INCI) |

Al 1%

| | | |
|---|---|---|
| A | 2.0 | Ceteareth-25 |
| | 2.0 | Ceteareth-6, Stearyl Alcohol |
| | 3.0 | Cetearyl Ethylhexanoate |
| | 1.0 | Dimethicone |
| | 4.0 | Cetearyl Alcohol |
| | 3.0 | Glyceryl Stearate SE |
| | 5.0 | Mineral Oil |
| | 4.0 | Simmondsia Chinensis (Jojoba) Seed Oil |
| | 3.0 | Mineral Oil, Lanolin Alcohol |
| B | 5.0 | Propylene Glycol |
| | 1.0 | Aqueous solution with about 5% fusion protein-KBD |
| | 1.0 | Panthenol |
| | 0.5 | Magnesium Aluminum Silicate |
| | q.s. | Preservative |
| | 65.5 | Aqua dem. |
| C | q.s. | Perfume oil |
| D | q.s. | Citric Acid |

Al 5%

| | | |
|---|---|---|
| A | 2.0 | Ceteareth-25 |
| | 2.0 | Ceteareth-6, Stearyl Alcohol |
| | 3.0 | Cetearyl Ethylhexanoate |
| | 1.0 | Dimethicone |
| | 4.0 | Cetearyl Alcohol |
| | 3.0 | Glyceryl Stearate SE |
| | 5.0 | Mineral Oil |
| | 4.0 | Simmondsia Chinensis (Jojoba) Seed Oil |
| | 3.0 | Mineral Oil, Lanolin Alcohol |
| B | 5.0 | Propylene Glycol |
| | 5.0 | Aqueous solution with about 5% fusion protein-KBD |
| | 1.0 | Panthenol |
| | 0.5 | Magnesium Aluminum Silicate |
| | q.s | Preservative |
| | 61.5 | Aqua dem. |
| C | q.s. | Perfume oil |
| D | q.s. | Citric Acid |

Preparation: Heat phases A and B separately to about 80° C. Briefly prehomogenize phase B, then stir phase B into phase A and homogenize again. Cool to about 40° C., add phase C and homogenize thoroughly again. Adjust the pH to 6-7 with citric acid.

### Example 51

### Moisturizing Body Care Cream

| | |
|---|---|
| % | Ingredient (INCI) |

Al 1%

| | | |
|---|---|---|
| A | 6.0 | PEG-7 Hydrogenated Castor Oil |
| | 10.0 | Cetearyl Ethylhexanoate |
| | 5.0 | Isopropyl Myristate |
| | 7.0 | Mineral Oil |
| | 0.5 | Shea Butter (Butyrospermum Parkii) |
| | 0.5 | Aluminum Stearate |
| | 0.5 | Magnesium Stearate |
| | 0.2 | Bisabolol |
| | 0.7 | Quaternium-18-Hectorite |
| B | 5.0 | Dipropylene Glycol |
| | 0.7 | Magnesium Sulfate |
| | q.s. | Preservative |
| | 62.9 | Aqua dem. |
| C | q.s. | Perfume oil |
| | 1.0 | Aqueous solution with about 5% fusion protein-KBD |

Al 5%

| | | |
|---|---|---|
| A | 6.0 | PEG-7 Hydrogenated Castor Oil |
| | 10.0 | Cetearyl Ethylhexanoate |
| | 5.0 | Isopropyl Myristate |
| | 7.0 | Mineral Oil |
| | 0.5 | Shea Butter (Butyrospermum Parkii) |
| | 0.5 | Aluminum Stearate |
| | 0.5 | Magnesium Stearate |
| | 0.2 | Bisabolol |
| | 0.7 | Quaternium-18-Hectorite |
| B | 5.0 | Dipropylene Glycol |
| | 0.7 | Magnesium Sulfate |
| | q.s. | Preservative |
| | 58.9 | Aqua dem. |
| C | q.s. | Perfume oil |
| | 5.0 | Aqueous solution with about 5% fusion protein-KBD |

Preparation: Heat phases A and B separately to about 80° C. Stir phase B into phase A and homogenize. Cool to about 40° C. with stirring, add phase C and homogenize again. Allow to cool to room temperature with stirring.

### Example 52

### Liquid Make-Up—O/W Type

| | |
|---|---|
| % | Ingredient (INCI) |

Al 1%

| | | |
|---|---|---|
| A | 2.0 | Ceteareth-6, Stearyl Alcohol |
| | 2.0 | Ceteareth-25 |
| | 6.0 | Glyceryl Stearate |
| | 1.0 | Cetyl Alcohol |
| | 8.0 | Mineral Oil |
| | 7.0 | Cetearyl Ethylhexanoate |
| | 0.2 | Dimethicone |
| B | 3.0 | Propylene Glycol |
| | 1.0 | Panthenol |
| | q.s. | Preservative |
| | 61.9 | Aqua dem. |
| C | 0.1 | Bisabolol |
| | 1.0 | Aqueous solution with about 5% fusion protein-KBD |
| | q.s. | Perfume oil |
| D | 5.7 | C.I. 77 891, Titanium Dioxide |
| | 1.1 | Iron Oxides |

Al 5%

| | | |
|---|---|---|
| A | 2.0 | Ceteareth-6, Stearyl Alcohol |
| | 2.0 | Ceteareth-25 |
| | 6.0 | Glyceryl Stearate |
| | 1.0 | Cetyl Alcohol |
| | 8.0 | Mineral Oil |
| | 7.0 | Cetearyl Ethylhexanoate |
| | 0.2 | Dimethicone |
| B | 3.0 | Propylene Glycol |
| | 1.0 | Panthenol |
| | q.s. | Preservative |
| | 57.9 | Aqua dem. |
| C | 0.1 | Bisabolol |
| | 5.0 | Aqueous solution with about 5% fusion protein-KBD |
| | q.s. | Perfume oil |
| D | 5.7 | C.I. 77 891, Titanium Dioxide |
| | 1.1 | Iron Oxides |

Preparation: Heat phases A and B separately to about 80° C. Stir phase B into phase A and homogenize. Cool to about 40° C with stirring, add phases C and D and thoroughly homogenize again. Allow to cool to room temperature with stirring.

### Example 53

[0823] Dermocosmetic preparations according to the invention are described below, comprising the keratin-binding effector molecule (C16-KBD-B according to SEQ ID No.: 168) prepared according to Example 3. The specified keratin-binding fusion protein is used as about 5% strength by weight aqueous solution. The following data are parts by weight.

Clear shampoo

| Ingredients (INCI) | 1 | 2 | 3 | 4 | 5 |
|---|---|---|---|---|---|
| Sodium Laureth Sulfate | 1.00 | — | 0.10 | 10.50 | — |
| Codamidopropyl Betaine | 7.50 | 7.00 | 5.00 | 5.50 | 10.00 |
| PEG-7 Glyceryl Cocoate | 2.00 | 2.50 | 3.50 | 5.00 | 2.30 |
| Perfume oil | 0.10 | 0.10 | 0.10 | 0.10 | 0.10 |
| Fusion protein-KBD | 1.0 | 5.0 | 20 | 0.5 | 10.0 |
| D-Panthenol USP | 1.00 | 1.50 | 1.80 | 1.70 | 1.40 |
| Preservative | 0.10 | 0.10 | 0.10 | 0.10 | 0.10 |
| Citric Acid | 0.10 | 0.10 | 0.10 | 0.10 | 0.10 |
| Luviquat ® Ultra Care | 1.50 | 1.00 | 1.50 | 1.20 | 1.10 |
| Sodium Chloride | 1.50 | 1.40 | 1.40 | 1.30 | 1.50 |
| Aqua dem. | ad 100 | ad 100 | ad 100 | ad 100 | ad 100 |

Shampoo

| Ingredients (INCI) | 1 | 2 | 3 | 4 | 5 |
|---|---|---|---|---|---|
| Sodium Laureth Sulfate | 1 | — | — | 0.1 | — |
| Decyl Glucoside | 5.00 | 5.50 | 4.90 | 3.50 | 7.00 |
| Cocamidopropyl Betaine | 10.00 | 5.00 | 12.50 | 7.50 | 15.00 |
| Perfume oil | 0.10 | 0.10 | 0.10 | 0.10 | 0.10 |
| Fusion protein-KBD | 1.0 | 5.0 | 0.1 | 20 | 10.0 |
| D-Panthenol USP | 0.50 | 1.00 | 0.80 | 1.50 | 0.50 |
| Preservative | 0.10 | 0.10 | 0.10 | 0.10 | 0.10 |
| Citric Acid | 0.10 | 0.10 | 0.10 | 0.10 | 0.10 |
| Laureth-3 | 0.50 | 2.00 | 0.50 | 0.50 | 2.00 |
| Sodium Chloride | 1.50 | 1.50 | 1.50 | 1.50 | 1.50 |
| Aqua dem. | ad 100 | ad 100 | ad 100 | ad 100 | ad 100 |

Clear conditioner shampoo

| Ingredients (INCI) | 1 | 2 | 3 | 4 | 5 |
|---|---|---|---|---|---|
| ® Disodium | 10.00 | 15.00 | 20.00 | 12.00 | 17.00 |
| Cocoamphodiacetate | | | | | |
| ® Decyl Glucoside | 5.00 | 6.00 | 7.00 | 8.00 | 4.00 |
| ® Cocamidopropyl | 15.00 | 12.00 | 10.00 | 18.00 | 20.00 |
| Betaine | | | | | |
| Luviquat ® FC 550 | 0.30 | 0.20 | 0.20 | 0.20 | 0.30 |
| Perfume oil | 0.10 | 0.10 | 0.10 | 0.10 | 0.10 |
| Fusion protein-KBD | 20.0 | 5.0 | 1.0 | 0.5 | 10.0 |
| Cremophor ® PS 20 | 5.00 | 1.00 | 1.00 | 7.00 | 5.00 |
| Preservative | 0.10 | 0.10 | 0.10 | 0.10 | 0.10 |
| ® Laureth-3 | 2.00 | 1.00 | 0.50 | 2.00 | 2.00 |
| Citric Acid | 0.20 | 0.20 | 0.20 | 0.20 | 0.20 |
| PEG-12 Distearate | 3.00 | 2.00 | 2.00 | 3.00 | 2.50 |
| Aqua dem. | ad 100 | ad 100 | ad 100 | ad 100 | ad 100 |

Foam O/W emulsions

| | Emulsion 1 | % by | Emulsion 2 | % by |
|---|---|---|---|---|
| | % by wt. | vol. | % by wt. | vol. |
| Stearic Acid | 5.00 | | 1.00 | |
| Cetyl Alcohol | 5.50 | | | |
| Cetearyl Alcohol | | | 2.00 | |
| PEG-40 Stearate | 8.50 | | | |
| PEG-20 Stearate | | | 1.00 | |
| Caprylic/Capric | 4.00 | | 2.00 | |
| Triglyceride | | | | |
| C12-15 Alkyl Benzoate | 10.00 | | 15.00 | |
| Cyclomethicone | 4.00 | | | |
| Dimethicone | | | 0.50 | |
| Fusion protein-KBD | 5.0 | | 10.0 | |
| Ethylhexyl Isostearate | | | 5.00 | |
| Myristyl Myristate | | | 2.00 | |
| Ceresin | 1.50 | | | |
| Glycerin | | | 3.00 | |
| Hydroxypropyl Starch | 1.00 | | 3.50 | |
| Phosphate | | | | |
| BHT | | | 0.02 | |
| Disodium EDTA | 0.50 | | 0.10 | |
| Perfume oil, Preservative | q.s. | | q.s. | |
| Colorant | q.s. | | q.s. | |
| Potassium Hydroxide | q.s. | | q.s. | |
| Aqua dem. | ad 100 | | ad 100 | |
| | adjust pH to | | adjust pH | |
| | 6.5-7.5 | | to 5.0-6.0 | |
| Emulsion 1 | | 70 | | |
| Emulsion 2 | | | | 35 |
| Nitrogen | | 30 | | |
| Propane/Butane | | | | 65 |

Conditioner Shampoo with pearlescence

| | 1 | 2 | 3 |
|---|---|---|---|
| Polyquaternium-10 | 0.50 | 0.50 | 0.40 |
| Sodium Laureth Sulfate | 0.5 | 0.1 | — |
| Codamidopropyl Betaine | 2.50 | 2.60 | 3.00 |
| Uvinul ® MS 40 | 1.50 | 0.50 | 1.00 |
| Fusion protein-KBD | 1.0 | 5.0 | 15 |
| Pearlescent solution | 2.00 | 2.50 | |
| Disodium EDTA | 0.10 | 0.15 | 0.05 |
| Preservative, Perfume oil, Thickener | q.s. | q.s. | q.s. |
| Aqua dem. | ad 100 | ad 100 | ad 100 |

adjust pH to 6.0

Clear conditioner shampoo

| | 1 | 2 | 3 |
|---|---|---|---|
| Polyquaternium-10 | 0.50 | 0.50 | 0.50 |
| Sodium Laureth Sulfate | — | 0.1 | — |
| Fusion protein-KBD | 5.0 | 10 | 3.0 |
| Uvinul M ® 40 | 1.00 | 1.50 | 0.50 |
| | 0.20 | 0.20 | 0.80 |
| Preservative, Perfume oil, Thickener | q.s. | q.s. | q.s. |
| Aqua dem. | ad 100 | ad 100 | ad 100 |

adjust pH to 6.0

Clear conditioner shampoo with volume effect

| | 1 | 2 | 3 |
|---|---|---|---|
| Sodium Laureth Sulfate | 0.2 | | |
| Uvinul ® MC 80 | 2.00 | 1.50 | 2.30 |
| Fusion protein-KBD | 10.0 | 0.5 | 0.5 |
| Cocamidopropyl Betaine | 2.50 | 2.60 | 2.20 |
| Disodium EDTA | 0.01 | 0.10 | 0.01 |
| Preservative, Perfume oil, Thickener | q.s. | q.s. | q.s. |
| Aqua dem. | ad 100 | ad 100 | ad 100 |

adjust pH to 6.0

Gel cream

| | 1 | 2 | 3 | 4 |
|---|---|---|---|---|
| Acrylates/C10-30 Alkylacrylate | 0.40 | 0.35 | 0.40 | 0.35 |
| Crosspolymer | | | | |
| Carbomer | 0.20 | 0.22 | 0.20 | 0.22 |
| Xanthan Gum | 0.10 | 0.13 | 0.10 | 0.13 |
| Cetearyl Alcohol | 3.00 | 2.50 | 3.00 | 2.50 |
| C12-15 Alkyl Benzoate | 4.00 | 4.50 | 4.00 | 4.50 |
| Caprylic/Capric Triglyceride | 3.00 | 3.50 | 3.00 | 3.50 |
| Uvinul ® A Plus ™ | 2.00 | 1.50 | 0.75 | 1.00 |
| UvaSorb ® k2A | | 3.00 | | |
| Ethylhexyl Bis- | | | | |
| Isopentylbenzoxazolylphenyl | | | | |
| Melamine | | | | |
| Uvinul ® MC 80 | 3.00 | | 1.00 | |
| Bis-Ethylhexyloxyphenol | | 1.50 | | 2.00 |
| Methoxyphenyl Triazine | | | | |
| Butyl Methoxydibenzoylmethane | | | 2.00 | |
| Disodium Phenyl Dibenzimidazole | 2.50 | | 0.50 | 2.00 |
| Tetrasulfonate | | | | |
| Uvinul ® T 150 | 4.00 | | 3.00 | 4.00 |
| Octocrylene | | 4.00 | | |
| Diethylhexyl Butamido Triazone | 1.00 | | | 2.00 |
| Phenylbenzimidazole Sulfonic | 0.50 | | 3.00 | |
| Acid | | | | |
| Methylene Bis-Benzotriazolyl | 2.00 | | 0.50 | 1.50 |
| Tetramethylbutyl phenol | | | | |
| Ethylhexyl Salicylate | | | 3.00 | |
| Drometrizole Trisiloxane | | | 0.50 | |
| Terephthalidene Dicamphor | | 1.50 | | 1.00 |
| Sulfonic Acid | | | | |
| Diethylhexyl 2,6-Naphthalate | 3.50 | 4.00 | 7.00 | 9.00 |
| Titanium Dioxide-microfine | 1.00 | | 3.00 | |
| Zinc Oxide-microfine | | | | 0.25 |
| Fusion protein-KBD | 2.0 | 0.5 | 1.0 | 10.0 |
| Cyclomethicone | 5.00 | 5.50 | 5.00 | 5.50 |
| Dimethicone | 1.00 | 0.60 | 1.00 | 0.60 |
| Glycerin | 1.00 | 1.20 | 1.00 | 1.20 |
| Sodium Hydroxide | q.s. | q.s. | q.s. | q.s. |
| Preservative | 0.30 | 0.23 | 0.30 | 0.23 |
| Perfume oil | 0.20 | | 0.20 | |
| Aqua dem. | ad 100 | ad 100 | ad 100 | ad 100 |

adjust pH to 6.0

OW sunscreen formulation

| | 1 | 2 | 3 | 4 | 5 | 6 | 7 |
|---|---|---|---|---|---|---|---|
| Glyceryl Stearate SE | 0.50 | 1.00 | 3.00 | | | 1.50 | |
| Glycerl Stearate Citrate | 2.00 | | 1.00 | 2.00 | 4.00 | | |
| Stearic Acid | | 3.00 | | 2.00 | | | |
| PEG-40 Stearate | 0.50 | | | | | 2.00 | |
| Cetyl Phosphate | | | | | | 1.00 | |
| Sodium Cetearyl Sulfate | | | | | | | 0.75 |
| Stearyl Alcohol | | | 3.00 | | | 2.00 | 0.60 |
| Cetyl Alcohol | 2.50 | 1.10 | | 1.50 | 0.60 | | 2.00 |
| Fusion protein-KBD | 10.0 | 0.5 | 3.0 | 5.0 | 0.1 | 0.02 | 7.5 |
| Uvinul ® A Plus ™ | 2.00 | 1.50 | 0.75 | 1.00 | 2.10 | 4.50 | 5.00 |
| UvaSorb ® k2A | | | | | | | |
| Ethylhexyl Bis- | | | | | | | |
| Isopentylbenzoxazolylphenyl | | | | | | | |
| Melamine | | | | | | | |
| Ethylhexyl Methoxycinnamate | | | | | 5.00 | 6.00 | 8.00 |
| Uvinul ® MC 80 | | | | | | | |
| Bis-Ethylhexyloxyphenol | | 1.50 | | 2.00 | 2.50 | | 2.50 |
| Methoxyphenyl Triazine | | | | | | | |
| Butyl Methoxydibenzoylmethane | | | 2.00 | | 2.00 | 1.50 | |
| Disodium Phenyl Dibenzimidazole | 2.50 | | 0.50 | 2.00 | | 0.30 | |
| Tetrasulfonate | | | | | | | |
| Ethyhexyl Triazone Uvinul ® T 150 | 4.00 | | 3.00 | 4.00 | | 2.00 | |
| Octocrylene | | 4.00 | | | | | 7.50 |
| Diethylhexyl Butamido Triazone | 1.00 | | | 2.00 | 1.00 | | 1.00 |
| Phenylbenzimidazole Sulfonic Acid | 0.50 | | 3.00 | | | | |
| Methylene Bis-Benzotriazolyl | 2.00 | | 0.50 | 1.50 | 2.50 | | |
| Tetramethylbutylphenol | | | | | | | |
| Ethylhexyl Salicylate | | | 3.00 | | | | 5.00 |
| Drometrizole Trisiloxane | | | 0.50 | | | 1.00 | |
| Terephthalidene Dicamphor | | 1.50 | | 1.00 | 1.00 | | 0.50 |
| Sulfonic Acid | | | | | | | |
| Diethylhexyl 2,6-Naphthalate | 3.50 | | 7.00 | | 6.00 | 9.00 | |
| Titanium Dioxide- microfine | 1.00 | | 3.00 | | 3.50 | | 1.50 |
| Zinc Oxide- microfine | | | | 0.25 | | 2.00 | |
| C12-15 Alkyl Benzoate | | 0.25 | | | 4.00 | 7.00 | |
| Dicapryl Ether | | | 3.50 | | 2.00 | | |
| Butylene Glycol | 5.00 | | 6.00 | | | | |
| Dicaprylate/Dicaprate | | | | | | | |
| Cocoglyceride | | | 6.00 | | 2.00 | | |
| Dimethicone | 0.50 | | 1.00 | | 2.00 | | |
| Cyclomethicone | 2.00 | | 0.50 | | 0.50 | | |
| Butyrospermum Parkii (Shea | | 2.00 | | | | | |
| Butter) | | | | | | | |
| VP/Hexadecene Copolymer | 0.20 | | | 0.50 | | 1.00 | |
| Glycerin | 3.00 | 7.50 | | 7.50 | 5.00 | | 2.50 |
| Xanthan Gum | 0.15 | | 0.05 | | | 0.30 | |
| Sodium Carbomer | | 0.20 | | 0.15 | 0.25 | | |
| Vitamin E Acetate | 0.60 | | 0.23 | | 0.70 | 1.00 | |
| Biosaccaride Gum-1 | | 3.00 | 10.00 | | | | |
| Glycine Soya (Soybean) Oil | | | | 0.50 | | 1.50 | 1.00 |
| Ethylhexylglycerin | 0.30 | | | | | | |
| DMDM Hydantoin | | 0.60 | 0.40 | 0.20 | | | |
| Iodopropynyl Butylcarbamate | | | | 0.18 | 0.20 | | |
| Methylparaben | 0.15 | | 0.25 | | 0.50 | | |
| Phenoxyethanol | 1.00 | 0.40 | | | 0.40 | 0.50 | 0.40 |
| Trisodium EDTA | 0.02 | | 0.05 | | | | |
| Tetrasodium Iminodisuccinate | | | | 0.25 | 1.00 | | |
| Ethanol | 2.00 | 1.50 | | 3.00 | | 1.20 | 5.00 |
| Perfume oil | 0.10 | 0.25 | 0.30 | | 0.40 | 0.20 | |
| Aqua dem. | ad 100 | ad 100 | ad 100 | ad 100 | ad 100 | ad100 | ad 100 |

Hydrodispersion

| | 1 | 2 | 3 | 4 | 5 |
|---|---|---|---|---|---|
| Ceteaereth-20 | 1.00 | | | 0.50 | |
| Cetyl Alcohol | | | 1.00 | | |
| Sodium Carbomer | | 0.20 | | 0.30 | |
| Acrylates/C10-30 Alkyl Acrylate | 0.50 | | 0.40 | 0.10 | 0.50 |
| Crosspolymer | | | | | |
| Xanthan Gum | | 0.30 | 0.15 | | |
| Fusion protein-KBD | 5.0 | 0.5 | 3.0 | 0.1 | 10.0 |
| Uvinul ® A Plus ™ | 2.00 | 1.50 | 0.75 | 1.00 | 2.10 |
| UvaSorb ® k2A Ethylhexyl Bis- | | 3.50 | | | |
| Isopentylbenzoxazolylphenyl Melamine | | | | | |
| Ethylhexyl Methoxycinnamate Uvinul ® MC | | | | | 5.00 |
| 80 | | | | | |
| Bis-Ethylhexyloxyphenol Methoxyphenyl | | 1.50 | | 2.00 | 2.50 |
| Triazine | | | | | |
| Butyl Methoxydibenzoylmethane | | | 2.00 | | 2.00 |
| Disodium Phenyl Dibenzimidazole | 2.50 | | 0.50 | 2.00 | |
| Tetrasulfonate | | | | | |
| Ethyhexyl Triazone Uvinul ® T 150 | 4.00 | | 3.00 | 4.00 | |
| Octocrylene | | 4.00 | | | |
| Diethylhexyl Butamido Triazone | 1.00 | | | 2.00 | 1.00 |
| Phenylbenzimidazole Sulfonic Acid | 0.50 | | 3.00 | | |
| Methylene Bis-Benzotriazolyl | 2.00 | | 0.50 | 1.50 | 2.50 |
| Tetramethylbutylphenol | | | | | |
| Ethylhexyl Salicylate | | | 3.00 | | |
| Drometrizole Trisiloxane | | | 0.50 | | |
| Terephthalidene Dicamphor Sulfonic Acid | | 1.50 | | 1.00 | 1.00 |
| Diethylhexyl 2,6-Naphthalate | | | 7.00 | | 9.00 |
| Titanium Dioxide- microfine | 1.00 | | 3.00 | | 3.50 |
| Zinc Oxide- microfine | | | | 0.25 | |
| C12-15 Alkyl Benzoate | 2.00 | 2.50 | | | |
| Dicapryl Ether | | 4.00 | | | |
| Butylene Glycol Dicaprylate/Dicaprate | 4.00 | | 2.00 | 6.00 | |
| Dicapryl Carbonate | | 2.00 | 6.00 | | |
| Dimethicone | | 0.50 | 1.00 | | |
| Phenyl Trimethicone | 2.00 | | 0.50 | | |
| Butyrospermum Parkii (Shea Butter) | | 2.00 | | 5.00 | |
| VP/Hexadecene Copolymer | 0.50 | | | 0.50 | 1.00 |
| Tricontanyl PVP | 0.50 | | 1.00 | | |
| Ethylhexylglycerin | | | 1.00 | | 0.80 |
| Glycerin | 3.00 | 7.50 | | 7.50 | 8.50 |
| Glycine Soya (Soybean) Oil | | | 1.50 | | 1.00 |
| Vitamin E Acetate | 0.50 | | 0.25 | | 1.00 |
| Glucosylrutin | 0.60 | | | 0.25 | |
| Biosaccaride Gum-1 | | 2.50 | 0.50 | | 2.00 |
| DMDM Hydantoin | | 0.60 | 0.45 | 0.25 | |
| Iodopropynyl Butylcarbamate | 0.20 | | | | |
| Methylparaben | 0.50 | | 0.25 | 0.15 | |
| Phenoxyethanol | 0.50 | 0.40 | | 1.00 | |
| Trisodium EDTA | | 0.01 | 0.05 | | 0.10 |
| Ethanol | 3.00 | 2.00 | 1.50 | | 7.00 |
| Perfume oil | 0.20 | | 0.05 | 0.40 | |
| Aqua dem. | ad 100 | ad 100 | ad 100 | ad 100 | ad 100 |

WO sunscreen emulsion

| | 1 | 2 | 3 | 4 | 5 |
|---|---|---|---|---|---|
| Cetyl Dimethicone | | 2.50 | | 4.00 | |
| Polyglyceryl-2 Dipolyhydroxystearate | 5.00 | | | | 4.50 |
| PEG-30 Dipolyhydroxystearate | | | 5.00 | | |
| Fusion protein-KBD | 5.0 | 1.0 | 10.0 | 0.5 | 0.1 |
| Uvinul ® A Plus ™ | 2.00 | 1.50 | 0.75 | 1.00 | 2.10 |
| UvaSorb ® k2A | | 2.00 | | | |
| Ethylhexyl Bis-Isopentylbenzoxazolylphenyl | | | | | |
| Melamine | | | | | |
| Ethylhexyl Methoxycinnamate Uvinul ® MC | | | | | 5.00 |
| 80 | | | | | |
| Bis-Ethylhexyloxyphenol Methoxyphenyl | | 1.50 | | 2.00 | 2.50 |
| Triazine | | | | | |
| Butyl Methoxydibenzoylmethane | | | 2.00 | | 2.00 |
| Disodium Phenyl Dibenzimidazole | 2.50 | | 0.50 | 2.00 | |
| Tetrasulfonate | | | | | |
| Ethyhexyl Triazone Uvinul ® T 150 | 4.00 | | 3.00 | 4.00 | |
| Octocrylene | | 4.00 | | | |
| Diethylhexyl Butamido Triazone | 1.00 | | | 2.00 | 1.00 |
| Phenylbenzimidazole Sulfonic Acid | 0.50 | | 3.00 | | |
| Methylene Bis-Benzotriazolyl | 2.00 | | 0.50 | 1.50 | 2.50 |
| Tetramethylbutylphenol | | | | | |
| Ethylhexyl Salicylate | | | 3.00 | | |
| Drometrizole Trisiloxane | | | 0.50 | | |
| Terephthalidene Dicamphor Sulfonic Acid | | 1.50 | | 1.00 | 1.00 |
| Diethylhexyl 2,6-Naphthalate | | | 7.00 | | 4.00 |
| Titanium Dioxide- microfine | 1.00 | | 3.00 | | 3.50 |
| Zinc Oxide- microfine | | | | 0.25 | |
| Mineral Oil | | 12.00 | 10.00 | | 8.00 |
| C12-15 Alkyl Benzoate | | | | 9.00 | |
| Dicaprylyl Ether | 10.00 | | | | 7.00 |
| Butylene Glycol Dicaprylate/Dicaprate | | | 2.00 | 8.00 | 4.00 |
| Dicaprylyl Carbonate | 5.00 | | 6.00 | | |
| Dimethicone | | 4.00 | 1.00 | 5.00 | |
| Cyclomethicone | 2.00 | 25.00 | | | 2.00 |
| Butyrospermum Parkii (Shea Butter) | | | 3.00 | | |
| Petrolatum | | 4.50 | | | |
| VP/Hexadecene Copolymer | 0.50 | | | 0.50 | 1.00 |
| Ethylhexylglycerin | | 0.30 | 1.00 | | 0.50 |
| Glycerin | 3.00 | 7.50 | | 7.50 | 8.50 |
| Glycine Soya (Soybean) Oil | | 1.00 | 1.50 | | 1.00 |
| Magnesium Sulfate MgSO4 | 1.00 | 0.50 | | 0.50 | |
| Magnesium Chloride MgCl2 | | | 1.00 | | 0.70 |
| Vitamin E Acetate | 0.50 | | 0.25 | | 1.00 |
| Ascorbyl Palmitate | 0.50 | | | 2.00 | |
| Biosaccaride Gum-1 | | | | 3.50 | 1.00 |
| DMDM Hydantoin | | 0.60 | 0.40 | 0.20 | |
| Methylparaben | 0.50 | | 0.25 | 0.15 | |
| Phenoxyethanol | 0.50 | 0.40 | | 1.00 | |
| Trisodium EDTA | 0.12 | 0.05 | | 0.30 | |
| Ethanol | 3.00 | | 1.50 | | 5.00 |
| Perfume oil | 0.20 | | 0.40 | 0.35 | |
| Aqua dem. | ad 100 | ad 100 | ad 100 | ad 100 | ad 100 |

Sticks

| | 1 | 2 | 3 | 4 |
|---|---|---|---|---|
| Caprylic/Capric Triglyceride | 12.00 | 10.00 | 6.00 | |
| Octyldodecanol | 7.00 | 14.00 | 8.00 | 3.00 |
| Butylene Glycol Dicaprylate/ | | | | 12.00 |
| Dicaprate | | | | |
| Pentaerythrityl Tetraisostearate | 10.00 | 6.00 | 8.00 | 7.00 |
| Polyglyceryl-3 Diisostearate | 2.50 | | | |
| Bis-Diglyceryl Polyacyladipate-2 | 9.00 | 8.00 | 10.00 | 8.00 |
| Cetearyl Alcohol | 8.00 | 11.00 | 9.00 | 7.00 |
| Myristyl Myristate | 3.50 | 3.00 | 4.00 | 3.00 |
| Beeswax | 5.00 | 5.00 | 6.00 | 6.00 |
| Copernicia Cerifera (Carnauba) | 1.50 | 2.00 | 2.00 | 1.50 |
| Wax | | | | |
| Cera Alba | 0.50 | 0.50 | 0.50 | 0.40 |
| C16-40 Alkyl Stearate | | 1.50 | 1.50 | 1.50 |
| Fusion protein-KBD | 0.5 | 3.0 | 1.0 | 5.0 |
| Uvinul ® A Plus ™ | 2.00 | 1.50 | 0.75 | 9.00 |
| UvaSorb ® k2A | | 2.00 | | 4.00 |
| Ethylhexyl Bis- | | | | |
| Isopentylbenzoxazolylphenyl | | | | |
| Melamine | | | | |
| Ethylhexyl Methoxycinnamate | | 3.00 | | |
| Uvinul ® MC 80 | | | | |
| Bis-Ethylhexyloxyphenol | | 1.50 | | 2.00 |
| Methoxyphenyl Triazine | | | | |
| Butyl Methoxydibenzoylmethane | | | 2.00 | |
| Disodium Phenyl Dibenzimidazole | 2.50 | | 0.50 | 2.00 |
| Tetrasulfonate | | | | |
| Ethyhexyl Triazone Uvinul ® T | 4.00 | | 3.00 | 4.00 |
| 150 | | | | |
| Octocrylene | | 4.00 | | |
| Diethylhexyl Butamido Triazone | 1.00 | | | 2.00 |
| Phenylbenzimidazole Sulfonic | 0.50 | | 3.00 | |
| Acid | | | | |
| Methylene Bis-Benzotriazolyl | 2.00 | | 0.50 | 1.50 |
| Tetramethylbutylphenol | | | | |
| Ethylhexyl Salicylate | | | 3.00 | |
| Drometrizole Trisiloxane | | | 0.50 | |
| Terephthalidene Dicamphor | | 1.50 | | 1.00 |
| Sulfonic Acid | | | | |
| Diethylhexyl 2,6-Naphthalate | | | 7.00 | |
| Titanium Dioxide-microfine | 1.00 | | 3.00 | |
| Zinc Oxide-microfine | | | | 0.25 |
| Vitamin E Acetate | 0.50 | 1.00 | | |
| Ascorbyl Palmitate | 0.05 | | 0.05 | |
| Buxux Chinensis (Jojoba) Oil | 2.00 | 1.00 | | 1.00 |
| Perfume oil, BHT | 0.10 | 0.25 | | 0.35 |
| Ricinus Communis (Castor) Oil | ad 100 | ad 100 | ad 100 | ad 100 |

PIT emulsion

| | 1 | 2 | 3 | 4 | 5 | 6 | 7 | 8 |
|---|---|---|---|---|---|---|---|---|
| Glyceryl Monostearate SE | 0.50 | 2.00 | 3.00 | 5.00 | | 0.50 | 4.00 | |
| Glyceryl Isostearate | | | | | 3.50 | 4.00 | 2.00 | |
| Isoceteth-20 | | 0.50 | | | 2.00 | | | |
| Ceteareth-12 | | 5.00 | | 1.00 | | | 3.50 | 5.00 |
| Ceteareth-20 | | 5.00 | | 1.00 | | | | 3.50 |
| PEG-100 Stearate | | | | 2.80 | | 2.30 | 3.30 | |
| Cetyl Alcohol | 5.20 | | 1.20 | 1.00 | 1.30 | | 0.50 | 0.30 |
| Cetyl Palmitate | 2.50 | 1.20 | | 1.50 | | 0.50 | | 1.50 |
| Cetyl Dimethicone | | | | 0.50 | | 1.00 | | |
| Copolyol | | | | | | | | |
| Polyglyceryl-2 Dioleate | | | | 0.75 | 0.30 | | | |
| Fusion protein-KBD | 0.1 | 5.0 | 20.0 | 0.5 | 3.0 | 0.25 | 10.0 | 3.0 |
| Uvinul ® A Plus ™ | 2.00 | 1.50 | 0.75 | 1.00 | 2.10 | 4.50 | 5.00 | 2.10 |
| UvaSorb ® k2A | | | 4.00 | | | | 1.50 | |
| Ethylhexyl Bis- | | | | | | | | |
| Isopentylbenzoxazolyl- | | | | | | | | |
| phenyl Melamine | | | | | | | | |
| Ethylhexyl | | | | | 5.00 | 6.00 | 8.00 | 5.00 |
| Methoxycinnamate | | | | | | | | |
| Uvinul ® MC 80 | | | | | | | | |
| Bis-Ethylhexyloxyphenol | | 1.50 | | 2.00 | 2.50 | | 2.50 | 2.50 |
| Methoxyphenyl Triazine | | | | | | | | |
| Butyl Methoxydibenzoyl- | | | 2.00 | | 2.00 | 1.50 | | 2.00 |
| methane | | | | | | | | |
| Disodium Phenyl | 2.50 | | 0.50 | 2.00 | | 0.30 | | |
| Dibenzimidazole | | | | | | | | |
| Tetrasulfonate | | | | | | | | |
| Ethyhexyl Triazone | 4.00 | | 3.00 | 4.00 | | 2.00 | | |
| Uvinul ® T 150 | | | | | | | | |
| Octocrylene | | 4.00 | | | | | 7.50 | |
| Diethylhexyl Butamido | 1.00 | | | 2.00 | 1.00 | | 1.00 | 1.00 |
| Triazone | | | | | | | | |
| Phenylbenzimidazole | 0.50 | | 3.00 | | | | | |
| Sulfonic Acid | | | | | | | | |
| Methylene Bis- | 2.00 | | 0.50 | 1.50 | 2.50 | | | 2.50 |
| Benzotriazolyl | | | | | | | | |
| Tetramethylbutylphenol | | | | | | | | |
| Ethylhexyl Salicylate | | | 3.00 | | | | 5.00 | |
| Drometrizole Trisiloxane | | | 0.50 | | | 1.00 | | |
| Terephthalylidene | | 1.50 | | 1.00 | 1.00 | | 0.50 | 1.00 |
| Dicamphor Sulfonic Acid | | | | | | | | |
| Diethylhexyl 2,6- | | | 7.00 | | 10.00 | 7.50 | | 8.00 |
| Naphthalate | | | | | | | | |
| Titanium | 1.00 | | 3.00 | | 3.50 | | 1.50 | 3.50 |
| Dioxide -microfine | | | | | | | | |
| Zinc Oxide - microfine | | | | 0.25 | | 2.00 | | |
| C12-15 Alkyl Benzoate | 3.50 | | | 6.35 | | | | 0.10 |
| Cocoglyceride | | 3.00 | | 3.00 | | | | 1.00 |
| Dicapryl Ether | 4.50 | | | | | | | |
| Dicaprylyl Carbonate | | 4.30 | | 3.00 | | | | 7.00 |
| Dibutyl Adipate | | | | 0.50 | | | | 0.30 |
| Phenyl Trimethicone | 2.00 | | | 3.50 | | 2.00 | | |
| Cyclomethicone | | 3.00 | | | | | | |
| C1-5 Alkyl | | 0.50 | | | 2.00 | | | |
| Galactomannan | | | | | | | | |
| Hydrogenated Coco- | | | | | 3.00 | 4.00 | | |
| Glycerides | | | | | | | | |
| Behenoxy Dimethicone | | | | | | 1.50 | 2.00 | |
| VP/Hexadecene | | | | 1.00 | 1.20 | | | |
| Copolymer | | | | | | | | |
| Glycerin | 4.00 | 6.00 | 5.00 | | 8.00 | 10.00 | | |
| Vitamin E Acetate | 0.20 | 0.30 | 0.40 | | 0.30 | | | |
| Butyrospermum Parkii | | 2.00 | | 3.60 | | 2.00 | | |
| (Shea Butter) | | | | | | | | |
| Iodopropyl | 0.12 | | | | 0.20 | | | |
| Butylcarbamate | | | | | | | | |
| Biosaccaride Gum-1 | | | | 0.10 | | | | |
| DMDM Hydantoin | 0.10 | | | | 0.12 | | 0.13 | |
| Methylparaben | | 0.50 | 0.30 | | 0.35 | | | |
| Phenoxyethanol | 0.50 | 0.40 | | 1.00 | | | | |
| Ethylhexylglycerin | | 0.30 | | | 1.00 | | 0.35 | |
| Ethanol | 2.00 | | 2.00 | | | 5.00 | | |
| Trisodium EDTA | 0.40 | | 0.15 | | | 0.20 | | |
| Perfume oil | 0.20 | | 0.20 | | 0.24 | 0.16 | 0.10 | 0.10 |
| Aqua dem. | ad 100 | ad 100 | ad 100 | ad 100 | ad 100 | ad 100 | ad 100 | ad |
| | | | | | | | | 100 |

Gel cream

| | 1 | 2 | 3 | 4 |
|---|---|---|---|---|
| Acrylates/C10-30 Alkylacrylate | 0.40 | 0.35 | 0.40 | 0.35 |
| Crosspolymer | | | | |
| Carbomer | 0.20 | 0.22 | 0.20 | 0.22 |
| Luvigel ® EM | 1.50 | 2.50 | 2.80 | 3.50 |
| Xanthan Gum | 0.10 | 0.13 | 0.10 | 0.13 |
| Cetearyl Alcohol | 3.00 | 2.50 | 3.00 | 2.50 |
| C12-15 Alkyl Benzoate | 4.00 | 4.50 | 4.00 | 4.50 |
| Caprylic/Capric Triglyceride | 3.00 | 3.50 | 3.00 | 3.50 |
| Titanium Dioxide-microfine | 1.00 | | 1.50 | |
| Zinc Oxide-microfine | | 2.00 | | 0.25 |
| Fusion protein-KBD | 0.5 | 10.0 | 3.0 | 5.0 |
| Dihydroxyacetone | | | 3.00 | 5.00 |
| Cyclomethicone | 5.00 | 5.50 | 5.00 | 5.50 |
| Dimethicone | 1.00 | 0.60 | 1.00 | 0.60 |
| Glycerin | 1.00 | 1.20 | 1.00 | 1.20 |
| Sodium Hydroxide | q.s. | q.s. | q.s. | q.s. |
| Preservative | 0.30 | 0.23 | 0.30 | 0.23 |
| Perfume oil | 0.20 | | 0.20 | |
| Aqua dem. | ad 100 | ad 100 | ad 100 | ad 100 |
| adjust pH to 6.0 | | | | |

OW self-tanning
formulation

| | 1 | 2 | 3 | 4 | 5 | 6 | 7 |
|---|---|---|---|---|---|---|---|
| Glyceryl Monostearate SE | 0.50 | 1.00 | 3.00 | | | 1.50 | |
| Glyceryl Stearate Citrate | 2.00 | | 1.00 | 2.00 | 4.00 | | |
| Stearic Acid | | 3.00 | | 2.00 | | | |
| PEG-40 Stearate | 0.50 | | | | | 2.00 | |
| Cetyl Phosphate | | | | | | 1.00 | |
| Cetearyl Sulfate | | | | | | | 0.75 |
| Stearyl Alcohol | | | 3.00 | | | 2.00 | 0.60 |
| Cetyl Alcohol | 2.50 | 1.10 | | 1.50 | 0.60 | | 2.00 |
| Fusion protein-KBD | 0.1 | 0.5 | 0.025 | 5.0 | 3.0 | 10.0 | 1.0 |
| Dihydroxyacetone | | | 3.00 | 5.00 | | 4 | |
| Titanium Dioxide - microfine | 1.00 | | | | 1.50 | | 1.50 |
| Zinc Oxide - microfine | | | | 0.25 | | 2.00 | |
| C12-15 Alkyl Benzoate | | 0.25 | | | 4.00 | 7.00 | |
| Dicapryl Ether | | | 3.50 | | 2.00 | | |
| Butylene Glycol | 5.00 | | 6.00 | | | | |
| Dicaprylate/Dicaprate | | | | | | | |
| Cocoglycerides | | | 6.00 | | 2.00 | | |
| Dimethicone | 0.50 | | 1.00 | | 2.00 | | |
| Cyclomethicone | 2.00 | | 0.50 | | 0.50 | | |
| Butyrospermum Parkii (Shea | | 2.00 | | | | | |
| Butter) | | | | | | | |
| VP/Hexadecene Copolymer | 0.20 | | | 0.50 | | 1.00 | |
| Glycerin | 3.00 | 7.50 | | 7.50 | 5.00 | | 2.50 |
| Xanthan Gum | 0.15 | | 0.05 | | | 0.30 | |
| Sodium Carbomer | | 0.20 | | 0.15 | 0.25 | | |
| Vitamin E Acetate | 0.60 | | 0.23 | | 0.70 | 1.00 | |
| Biosaccaride Gum-1 | | 3.00 | 10.00 | | | | |
| Glycine Soya (Soybean) Oil | | | | 0.50 | | 1.50 | 1.00 |
| Ethylhexylglycerin | 0.30 | | | | | | |
| DMDM Hydantoin | | 0.60 | 0.40 | 0.20 | | | |
| Iodopropynyl Butylcarbamate | | | | 0.18 | 0.20 | | |
| Methylparaben | 0.15 | | 0.25 | | 0.50 | | |
| Phenoxyethanol | 1.00 | 0.40 | | | 0.40 | 0.50 | 0.40 |
| Trisodium EDTA | 0.02 | | 0.05 | | | | |
| Tetrasodium | | | | 0.25 | 1.00 | | |
| Iminodisuccinate | | | | | | | |
| Ethanol | 2.00 | 1.50 | | 3.00 | | 1.20 | 5.00 |
| Perfume oil | 0.10 | 0.25 | 0.30 | | 0.40 | 0.20 | |
| Aqua dem. | ad 100 | ad 100 | ad 100 | ad 100 | ad 100 | ad 100 | ad 100 |

OW make-up

| | 1 | 2 | 3 | 4 | 5 | 6 | 7 |
|---|---|---|---|---|---|---|---|
| Glyceryl Monostearate SE | 0.50 | 1.00 | 3.00 | | | 1.50 | |
| Glycerl Stearate Citrate | 2.00 | | 1.00 | 2.00 | 4.00 | | |
| Stearic Acid | | 3.00 | | 2.00 | | | |
| PEG-40 Stearate | 0.50 | | | | | 2.00 | |
| Cetyl Phosphate | | | | | | 1.00 | |
| Cetearyl Sulfate | | | | | | | 0.75 |
| Stearyl Alcohol | | | 3.00 | | | 2.00 | 0.60 |
| Cetyl Alcohol | 2.50 | 1.10 | | 1.50 | 0.60 | | 2.00 |
| Fusion protein-KBD | 3.0 | 5.0 | 2.0 | 0.5 | 1.0 | 5.0 | 10.0 |
| Titanium Dioxide | 10.00 | 12.00 | 9.00 | 8.50 | 11.00 | 9.50 | 10.00 |
| Iron Oxide | 2.00 | 4.00 | 3.00 | 5.00 | 3.40 | 6.00 | 4.40 |
| Zinc Oxide | | 4.00 | | 2.00 | | 3.00 | |
| C12-15 Alkyl Benzoate | | 0.25 | | | 4.00 | 7.00 | |
| Dicapryl Ether | | | 3.50 | | 2.00 | | |
| Butylene Glycol | 5.00 | | 6.00 | | | | |
| Dicaprylate/Dicaprate | | | | | | | |
| Cocoglycerides | | | 6.00 | | 2.00 | | |
| Dimethicone | 0.50 | | 1.00 | | 2.00 | | |
| Cyclomethicone | 2.00 | | 0.50 | | 0.50 | | |
| Butyrospermum Parkii (Shea | | 2.00 | | | | | |
| Butter) | | | | | | | |
| VP/Hexadecene Copolymer | 0.20 | | | 0.50 | | 1.00 | |
| Glycerin | 3.00 | 7.50 | | 7.50 | 5.00 | | 2.50 |
| Xanthan Gum | 0.15 | | 0.05 | | | 0.30 | |
| Sodium Carbomer | | 0.20 | | 0.15 | 0.25 | | |
| Vitamin E Acetate | 0.60 | | 0.23 | | 0.70 | 1.00 | |
| Glycine Soya (Soybean) Oil | | | | 0.50 | | 1.50 | 1.00 |
| Ethylhexylglycerin | 0.30 | | | | | | |
| DMDM Hydantoin | | 0.60 | 0.40 | 0.20 | | | |
| Iodopropynyl Butylcarbamate | | | | 0.18 | 0.20 | | |
| Methylparaben | 0.15 | | 0.25 | | 0.50 | | |
| Phenoxyethanol | 1.00 | 0.40 | | | 0.40 | 0.50 | 0.40 |
| Trisodium EDTA | 0.02 | | 0.05 | | | | |
| Tetrasodium | | | | 0.25 | 1.00 | | |
| Iminodisuccinate | | | | | | | |
| Ethanol | 2.00 | 1.50 | | 3.00 | | 1.20 | 5.00 |
| Perfume oil | 0.10 | 0.25 | 0.30 | | 0.40 | 0.20 | |
| Aqua dem. | ad 100 | ad 100 | ad 100 | ad 100 | ad 100 | ad 100 | ad 100 |

Self-tanning hydrodispersion

| | 1 | 2 | 3 | 4 | 5 |
|---|---|---|---|---|---|
| Ceteareth-20 | 1.00 | | | 0.50 | |
| Cetyl Alcohol | | | 1.00 | | |
| Luvigel ® EM | | 2.00 | | 2.50 | 2.00 |
| Acrylates/C10-30 Alkyl Acrylate | 0.50 | | 0.40 | 0.10 | 0.50 |
| Crosspolymer | | | | | |
| Xanthan Gum | | 0.30 | 0.15 | | |
| Fusion protein-KBD | 3.0 | 1.0 | 0.5 | 0.1 | 5.0 |
| Dihydroxyacetone | | | 3.00 | 5.00 | |
| Uvinul ® A Plus ™ | 2.00 | 1.50 | 0.75 | 1.00 | 2.10 |
| Titanium Dioxide - microfine | 1.00 | | 1.00 | | 1.00 |
| Zinc Oxide - microfine | | 1.90 | | 0.25 | |
| C12-15 Alkyl Benzoate | 2.00 | 2.50 | | | |
| Dicapryl Ether | | 4.00 | | | |
| Butylene Glycol Dicaprylate/Dicaprate | 4.00 | | 2.00 | 6.00 | |
| Dicapryl Carbonate | | 2.00 | 6.00 | | |
| Dimethicone | | 0.50 | 1.00 | | |
| Phenyl Trimethicone | 2.00 | | 0.50 | | |
| Butyrospermum Parkii (Shea Butter) | | 2.00 | | 5.00 | |
| VP/Hexadecene Copolymer | 0.50 | | | 0.50 | 1.00 |
| Tricontanyl PVP | 0.50 | | 1.00 | | |
| Ethylhexylglycerin | | | 1.00 | | 0.80 |
| Glycerin | 3.00 | 7.50 | | 7.50 | 8.50 |
| Glycine Soya (Soybean) Oil | | | 1.50 | | 1.00 |
| Vitamin E Acetate | 0.50 | | 0.25 | | 1.00 |
| Glucosylrutin | 0.60 | | | 0.25 | |
| DMDM Hydantoin | | 0.60 | 0.45 | 0.25 | |
| Iodopropynyl Butylcarbamate | 0.20 | | | | |
| Methylparaben | 0.50 | | 0.25 | 0.15 | |
| Phenoxyethanol | 0.50 | 0.40 | | 1.00 | |
| Trisodium EDTA | | 0.01 | 0.05 | | 0.10 |
| Ethanol | 3.00 | 2.00 | 1.50 | | 7.00 |
| Perfume oil | 0.20 | | 0.05 | 0.40 | |
| Aqua dem. | ad 100 | ad 100 | ad 100 | ad 100 | ad 100 |

Aftersun hydrodispersion

| | 1 | 2 | 3 | 4 | 5 |
|---|---|---|---|---|---|
| Ceteareth-20 | 1.00 | | | 0.50 | |
| Cetyl Alcohol | | | 1.00 | | |
| Luvigel ® EM | | 2.00 | | 2.50 | 2.00 |
| Acrylates/C10-30 Alkyl | 0.50 | 0.30 | 0.40 | 0.10 | 0.50 |
| Acrylate Crosspolymer | | | | | |
| Xanthan Gum | | 0.30 | 0.15 | | |
| Fusion protein-KBD | 0.1 | 5.0 | 0.5 | 3.0 | 1.0 |
| C12-15 Alkyl Benzoate | 2.00 | 2.50 | | | |
| Dicapryl Ether | | 4.00 | | | |
| Butylene glycol | 4.00 | | 2.00 | 6.00 | |
| Dicaprylate/Dicaprate | | | | | |
| Dicapryl Carbonate | | 2.00 | 6.00 | | |
| Dimethicone | | 0.50 | 1.00 | | |
| Phenyl Trimethicone | 2.00 | | 0.50 | | |
| Tricontanyl PVP | 0.50 | | 1.00 | | |
| Ethylhexylglycerin | | | 1.00 | | 0.80 |
| Glycerin | 3.00 | 7.50 | | 7.50 | 8.50 |
| Glycine Soya (Soybean) | | | 1.50 | | 1.00 |
| Oil | | | | | |
| Vitamin E Acetate | 0.50 | | 0.25 | | 1.00 |
| Glucosylrutin | 0.60 | | | 0.25 | |
| Trisodium EDTA | | 0.01 | 0.05 | | 0.10 |
| Ethanol | 15.00 | 10.00 | 8.00 | 12.00 | 9.00 |
| Perfume oil | 0.20 | | 0.05 | 0.40 | |
| Aqua dem. | ad 100 | ad 100 | ad 100 | ad 100 | ad 100 |

WO emulsions

| | 1 | 2 | 3 | 4 | 5 |
|---|---|---|---|---|---|
| Cetyl Dimethicone | | 2.50 | | 4.00 | |
| Polyglyceryl-2 Dipolyhydroxystearate | 5.00 | | | | 4.50 |
| PEG-30Dipolyhydroxystearate | | | 5.00 | | |
| Fusion protein-KBD | 5.0 | 10.0 | 0.1 | 0.5 | 1.0 |
| Uvinul ® A Plus ™ | 2.00 | 1.50 | 0.75 | 1.00 | 2.10 |
| Titanium Dioxide- microfine | 1.00 | | 3.00 | | 3.50 |
| Zinc Oxide- microfine | | 0.90 | | 0.25 | |
| Mineral Oil | | 12.00 | 10.00 | | 8.00 |
| C12-15 Alkyl Benzoate | | | | 9.00 | |
| Dicaprylyl Ether | 10.00 | | | | 7.00 |
| Butylene Glycol Dicaprylate/Dicaprate | | | 2.00 | 8.00 | 4.00 |
| Dicaprylyl Carbonate | 5.00 | | 6.00 | | |
| Dimethicone | | 4.00 | 1.00 | 5.00 | |
| Cyclomethicone | 2.00 | 25.00 | | | 2.00 |
| Butyrospermum Parkii (Shea Butter) | | | 3.00 | | |
| Petrolatum | | 4.50 | | | |
| VP/Hexadecene Copolymer | 0.50 | | | 0.50 | 1.00 |
| Ethylhexylglycerin | | 0.30 | 1.00 | | 0.50 |
| Glycerin | 3.00 | 7.50 | | 7.50 | 8.50 |
| Glycine Soya (Soybean) Oil | | 1.00 | 1.50 | | 1.00 |
| Magnesium Sulfate | 1.00 | 0.50 | | 0.50 | |
| Magnesium Chloride | | | 1.00 | | 0.70 |
| Vitamin E Acetate | 0.50 | | 0.25 | | 1.00 |
| Ascorbyl Palmitate | 0.50 | | | 2.00 | |
| Biosaccaride Gum-1 | | | | 3.50 | 7.00 |
| DMDM Hydantoin | | 0.60 | 0.40 | 0.20 | |
| Methylparaben | 0.50 | | 0.25 | 0.15 | |
| Phenoxyethanol | 0.50 | 0.40 | | 1.00 | |
| Trisodium EDTA | 0.12 | 0.05 | | 0.30 | |
| Ethanol | 3.00 | | 1.50 | | 5.00 |
| Perfume oil | 0.20 | | 0.40 | 0.35 | |
| Aqua dem. | ad 100 | ad 100 | ad 100 | ad 100 | ad 100 |

Solids-stabilized emulsion
(Pickering emulsions)

| | 1 | 2 | 3 | 4 | 5 |
|---|---|---|---|---|---|
| Mineral Oil | | | 16.00 | 16.00 | |
| Octyldodecanol | 9.00 | 9.00 | 5.00 | | |
| Caprylic/Capric Triglyceride | 9.00 | 9.00 | 6.00 | | |
| C12-15 Alkyl Benzoate | | | | 5.00 | 8.00 |
| Butylene Glycol Dicaprylate/Dicaprate | | | | | 8.00 |
| Dicaprylyl Ether | 9.00 | | | 4.00 | |
| Dicaprylyl Carbonate | | 9.00 | | | |
| Hydroxyoctacosanyl Hydroxystearate | 2.00 | 2.00 | 2.20 | 2.50 | 1.50 |
| Disteardimonium Hectorite | 1.00 | 0.75 | | 0.50 | 0.25 |
| Cera Microcristallina + Paraffinum Liquidum | | 0.35 | | | 5.00 |
| Hydroxypropyl Methylcellulose | | | 0.10 | | 0.05 |
| Dimethicone | | | | | 3.00 |
| Fusion protein-KBD | 1.0 | 0.5 | 0.1 | 3.0 | 5.0 |
| Titanium Dioxide + Alumina + Simethicone + | | 3.00 | | | |
| Aqua | | | | | |
| Titanium Dioxide + Trimethoxycaprylylsilane | | 2.00 | 4.00 | 2.00 | 4.00 |
| Silica Dimethyl Silylate | 2.50 | | | 6.00 | 2.50 |
| Boron Nitride | | | 1.00 | | |
| Starch/Sodium metaphosphate Polymer | 2.00 | | | | |
| Tapioca Starch | | 0.50 | | | |
| Sodium Chloride | 5.00 | 7.00 | 8.50 | 3.00 | 4.50 |
| Glycerin | | | | 1.00 | |
| Trisodium EDTA | 1.00 | 1.00 | 1.00 | 1.00 | 1.00 |
| Vitamin E Acetate | 5.00 | 10.00 | 3.00 | 6.00 | 10.00 |
| Ascorbyl Palmitate | 1.00 | 1.00 | | 1.00 | |
| Methylparaben | | 0.60 | | | 0.20 |
| Propylparaben | | | | | 0.20 |
| Phenoxyathanol | | | 0.20 | | |
| Hexamidine Diisethionate | | | 0.40 | 0.50 | 0.40 |
| Diazolidinyl Urea | | | | | 0.08 |
| Ethanol | | | 0.23 | 0.20 | |
| Perfume oil | 5.00 | | 3.00 | 4.00 | |
| Aqua dem. | 0.20 | | 0.30 | 0.10 | |
| | ad 100 | ad 100 | ad 100 | ad 100 | ad 100 |

Sticks

| | 1 | 2 | 3 | 4 |
|---|---|---|---|---|
| Caprylic/Capric Triglyceride | 12.00 | 10.00 | 6.00 | |
| Octyldodecanol | 7.00 | 14.00 | 8.00 | 3.00 |
| Butylene Glycol Dicaprylate/ | | | | 12.00 |
| Dicaprate | | | | |
| Pentaerythrityl Tetraisostearate | 10.00 | 6.00 | 8.00 | 7.00 |
| Polyglyceryl-3 Diisostearate | 2.50 | | | |
| Bis-Diglyceryl Polyacyladipate-2 | 9.00 | 8.00 | 10.00 | 8.00 |
| Cetearyl Alcohol | 8.00 | 11.00 | 9.00 | 7.00 |
| Myristyl Myristate | 3.50 | 3.00 | 4.00 | 3.00 |
| Beeswax | 5.00 | 5.00 | 6.00 | 6.00 |
| Copernicia Cerifera (Carnauba) | 1.50 | 2.00 | 2.00 | 1.50 |
| Wax | | | | |
| Cera Alba | 0.50 | 0.50 | 0.50 | 0.40 |
| C16-40 Alkyl Stearate | | 1.50 | 1.50 | 1.50 |
| Fusion protein-KBD | 10.0 | 1.0 | 3.0 | 0.1 |
| Uvinul ® A Plus ™ | 2.00 | 1.50 | 0.75 | 9.00 |
| Titanium Dioxide-microfine | 1.00 | | 3.00 | |
| Zinc Oxide-microfine | | 1.00 | | 0.25 |
| Vitamin E Acetate | 0.50 | 1.00 | | |
| Ascorbyl Palmitate | 0.05 | | 0.05 | |
| Buxux Chinensis (Jojoba) Oil | 2.00 | 1.00 | | 1.00 |
| Perfume oil, BHT | 0.10 | 0.25 | | 0.35 |
| Ricinus Communis (Castor) Oil | ad 100 | ad 100 | ad 100 | ad 100 |

Self-tanning PIT emulsions

| | 1 | 2 | 3 | 4 | 5 | 6 | 7 | 8 |
|---|---|---|---|---|---|---|---|---|
| Glyceryl Monostearate SE | 0.50 | 2.00 | 3.00 | 5.00 | | 0.50 | 4.00 | |
| Glyceryl Isostearate | | | | | 3.50 | 4.00 | 2.00 | |
| Isoceteth-20 | | 0.50 | | | 2.00 | | | |
| Ceteareth-12 | | 5.00 | | 1.00 | | | 3.50 | 5.00 |
| Ceteareth-20 | | 5.00 | | 1.00 | | | | 3.50 |
| PEG-100 Stearate | | | | 2.80 | | 2.30 | 3.30 | |
| Cetyl Alcohol | 5.20 | | 1.20 | 1.00 | 1.30 | | 0.50 | 0.30 |
| Cetyl Palmitate | 2.50 | 1.20 | | 1.50 | | 0.50 | | 1.50 |
| Cetyl Dimethicone Copolyol | | | | 0.50 | | 1.00 | | |
| Polyglyceryl-2 | | | | 0.75 | 0.30 | | | |
| Fusion protein-KBD | 0.1 | 0.5 | 0.01 | 5.0 | 0.5 | 3.0 | 0.025 | 10.0 |
| Dihydroxyacetone | | | 3.00 | 5.00 | | | 4.00 | |
| Uvinul ® A Plus ™ | 2.00 | 1.50 | 0.75 | 1.00 | 2.10 | 4.50 | 5.00 | 2.10 |
| Titanium Dioxide-microfine | 1.00 | | 1.50 | | 3.50 | | 1.50 | 1.00 |
| Zinc Oxide-microfine | | 1.00 | | 0.25 | | 2.00 | | 1.50 |
| C12-15 Alkyl Benzoate | 3.50 | | | 6.35 | | | | 0.10 |
| Cocoglycerides | | 3.00 | | 3.00 | | | | 1.00 |
| Dicapryl Ether | 4.50 | | | | | | | |
| Dicaprylyl Carbonate | | 4.30 | | 3.00 | | | | 7.00 |
| Dibutyl Adipate | | | | 0.50 | | | | 0.30 |
| Phenyl Trimethicone | 2.00 | | | 3.50 | | 2.00 | | |
| Cyclomethicone | | 3.00 | | | | | | |
| C1-5 Alkyl Galactomannan | | 0.50 | | | 2.00 | | | |
| Hydrogenated Coco-Glycerides | | | | | 3.00 | 4.00 | | |
| Behenoxy Dimethicone | | | | | | 1.50 | 2.00 | |
| VP/Hexadecene Copolymer | | | | 1.00 | 1.20 | | | |
| Glycerin | 4.00 | 6.00 | 5.00 | | 8.00 | 10.00 | | |
| Vitamin E Acetate | 0.20 | 0.30 | 0.40 | | 0.30 | | | |
| Butyrospermum Parkii (Shea | | 2.00 | | 3.60 | | 2.00 | | |
| Butter) | | | | | | | | |
| Iodopropyl Butylcarbamate | 0.12 | | | | 0.20 | | | |
| DMDM Hydantoin | 0.10 | | | | 0.12 | | 0.13 | |
| Methylparaben | | 0.50 | 0.30 | | 0.35 | | | |
| Phenoxyethanol | 0.50 | 0.40 | | 1.00 | | | | |
| Ethylhexylglycerin | | 0.30 | | | 1.00 | | 0.35 | |
| Ethanol | 2.00 | | 2.00 | | | 5.00 | | |
| Trisodium EDTA | 0.40 | | 0.15 | | | 0.20 | | |
| Perfume oil | 0.20 | | 0.20 | | 0.24 | 0.16 | 0.10 | 0.10 |
| Aqua dem. | ad 100 | ad 100 | ad 100 | ad 100 | ad 100 | ad 100 | ad 100 | ad 100 |

Oil gel

| | 1 | 2 | 3 | 4 |
|---|---|---|---|---|
| Caprylic/Capric Triglyceride | 12.00 | 10.00 | 6.00 | |
| Octyldodecanol | 7.00 | 14.00 | 8.00 | 3.00 |
| Butylene Glycol | | | | 12.00 |
| Dicaprylate/Dicaprate | | | | |
| Pentaerythrityl Tetraisostearate | 10.00 | 6.00 | 8.00 | 7.00 |
| Polyglyceryl-3 Diisostearate | 2.50 | | | |
| Bis-Diglyceryl Polyacyladipate-2 | 9.00 | 8.00 | 10.00 | 8.00 |
| Myristyl Myristate | 3.50 | 3.00 | 4.00 | 3.00 |
| Quaternium-18 Bentonite | 5.00 | 5.00 | 6.00 | 6.00 |
| Propylene Carbonate | 15.00 | 20.00 | 18.00 | 19.50 |
| Fusion protein-KBD | 1.0 | 0.5 | 3.0 | 5.0 |
| Vitamin E Acetate | 0.50 | 1.00 | | |
| Ascorbyl Palmitate | 0.05 | | 0.05 | |
| Buxus Chinensis (Jojoba) Oil | 2.00 | 1.00 | | 1.00 |
| Perfume oil, BHT | 0.10 | 0.25 | | 0.35 |
| Ricinus Communis (Castor) Oil | ad 100 | ad 100 | ad 100 | ad 100 |

### Example 54

[0824] In the formulations below, cosmetic sunscreen preparations comprising a combination of at least one inorganic pigment, preferably zinc oxide and/or titanium dioxide and organic UV-A and UV-B filters are described.

[0825] The formulations specified below are prepared in customary ways known to the person skilled in the art.

[0826] The content of fusion protein C16-KBD-B (according to SEQ ID No.: 168) refers to 100% of active ingredient. The active ingredient according to the invention can either be used in pure form or else in the form of an aqueous solution. In the case of the aqueous solution, the content of Water demin in the particular formulation must be adjusted.

[0827] It will be appreciated by the person skilled in the art that all of the other KBD fusion proteins mentioned can also be produced using the corresponding KBD fusion protein constructs, e.g. KBD-D protein according to (SEQ ID No.: 212) in pRee024 (FIG. 8) according to Example 3 and can be used in the preparations given below.

[0828] The C16-KBD-B in the following examples is referred to as fusion protein-KBD by way of representation for all of the other abovedescribed KBD fusion proteins.

| | | | |
|---|---|---|---|
| A | 7.50 | Uvinul MC 80 | Ethylhexyl Cinnamate |
| | 2.00 | Uvinul M 40 | Benzophenone-3 |
| | 0.80 | Rylo PG 11 | Polyglyceryl Dimer Soyate |
| | 1.00 | Span 60 | Sorbitan Stearate |
| | 0.50 | Vitamin E acetate | Tocopheryl Acetate |
| | 3.00 | Dracorin 100 SE | Glyceryl Stearate, PEG-100 Stearate |
| | 1.00 | Cremophor CO 410 | PEG-40 Hydrogenated Castor Oil |
| B | 3.00 | T-Lite SF | Titanium Dioxide, Alumina Hydrate, |
| | | | Dimethicone/Methicone Copolymer |
| | 1.00 | Cetiol SB 45 | Butyrospermum Parkii (Shea Butter) |
| | 6.50 | Finsolv TN | C12-15 Alkyl Benzoate |
| C | 5.00 | Butylene Glycol | Butylene Glycol |
| | 0.30 | Keltrol | Xanthan Gum |
| | 0.10 | Edeta BD | Disodium EDTA |
| | 0.10 | Allantoin | Allantoin |
| | 66.20 | Water demin. | Aqua dem. |
| D | 1.00 | Sepigel 305 | Polyacrylamide, C13-14 Isoparaffin, |
| | | | Laureth-7 |
| | 1% | Fusion protein-KBD | |
| | q.s. | Preservative | |

| | | | |
|---|---|---|---|
| A | 7.50 | Uvinul MC 80 | Ethylhexyl Cinnamate |
| | 2.00 | Uvinul M 40 | Benzophenone-3 |
| | 0.80 | Rylo PG 11 | Polyglyceryl Dimer Soyate |
| | 1.00 | Span 60 | Sorbitan Stearate |
| | 0.50 | Vitamin E acetate | Tocopheryl Acetate |
| | 3.00 | Dracorin 100 SE | Glyceryl Stearate, PEG-100 Stearate |
| | 1.00 | Cremophor CO 410 | PEG-40 Hydrogenated Castor Oil |
| B | 3.00 | Z-COTE MAX | Zinc Oxide (and) Diphenyl Capryl |
| | | | Methicone |
| | 1.00 | Cetiol SB 45 | Butyrospermum Parkii (Shea Butter) |
| | 6.50 | Finsolv TN | C12-15 Alkyl Benzoate |
| C | 5.00 | Butylene Glycol | Butylene Glycol |
| | 0.30 | Keltrol | Xanthan Gum |
| | 0.10 | Edeta BD | Disodium EDTA |
| | 0.10 | Allantoin | Allantoin |
| | 66.20 | Water demin. | Aqua dem. |
| D | 2.00 | Simulgel NS | Hydroxyethyl Acrylate/Sodium |
| | | | Acryloyldimethyl Taurate |
| | | | Copolymer, Squalane, Polysorbate 60 |
| | 1% | Fusion protein-KBD | |
| | q.s. | | Preservative |

| | | | |
|---|---|---|---|
| A | 7.50 | Uvinul MC 80 | Ethylhexyl Cinnamate |
| | 2.00 | Uvinul A Plus | Diethylamino Hydroxybenzoyl Hexyl |
| | | | Benzoate |
| | 0.80 | Rylo PG 11 | Polyglyceryl Dimer Soyate |
| | 1.00 | Span 60 | Sorbitan Stearate |
| | 0.50 | Vitamin E acetate | Tocopheryl Acetate |
| | 3.00 | Dracorin 100 SE | Glyceryl Stearate, PEG-100 Stearate |
| | 1.00 | Cremophor CO 410 | PEG-40 Hydrogenated Castor Oil |
| B | 3.00 | Z-COTE MAX | Zinc Oxide (and) Diphenyl Capryl |
| | | | Methicone |
| | 1.00 | Cetiol SB 45 | Butyrospermum Parkii (Shea Butter) |
| | 6.50 | Finsolv TN | C12-15 Alkyl Benzoate |
| C | 5.00 | Butylene Glycol | Butylene Glycol |
| | 0.30 | Keltrol | Xanthan Gum |
| | 0.10 | Edeta BD | Disodium EDTA |
| | 0.10 | Allantoin | Allantoin |
| | 66.20 | Water demin. | Aqua dem. |
| D | 2.00 | Simulgel NS | Hydroxyethyl Acrylate/Sodium |
| | | | Acryloyldimethyl Taurate |
| | | | Copolymer, Squalane, Polysorbate 60 |
| | 1% | Fusion protein-KBD | |
| | q.s. | | Preservative |

| | | | |
|---|---|---|---|
| A | 4.00 | Uvinul MC 80 | Ethylhexyl Cinnamate |
| | 2.00 | Uvinul T 150 | Ethyl Hexyl Triazone |
| | 2.00 | Uvinul A Plus | Diethylamino Hydroxybenzoyl Hexyl |
| | | | Benzoate |
| | 0.80 | Rylo PG 11 | Polyglyceryl Dimer Soyate |
| | 1.00 | Span 60 | Sorbitan Stearate |
| | 0.50 | Vitamin E acetate | Tocopheryl Acetate |
| | 3.00 | Dracorin 100 SE | Glyceryl Stearate, PEG-100 Stearate |
| | 1.00 | Cremophor CO 410 | PEG-40 Hydrogenated Castor Oil |
| B | 3.00 | Z-COTE MAX | Zinc Oxide (and) Diphenyl Capryl |
| | | | Methicone |
| | 1.00 | Cetiol SB 45 | Butyrospermum Parkii (Shea Butter) |
| | 6.50 | Finsolv TN | C12-15 Alkyl Benzoate |
| C | 5.00 | Butylene Glycol | Butylene Glycol |
| | 0.30 | Keltrol | Xanthan Gum |
| | 0.10 | Edeta BD | Disodium EDTA |
| | 0.10 | Allantoin | Allantoin |
| | 66.20 | Water demin. | Aqua dem. |
| D | 2.00 | Simulgel NS | Hydroxyethyl Acrylate/Sodium |
| | | | Acryloyldimethyl Taurate |
| | | | Copolymer, Squalane, Polysorbate 60 |
| | 1% | Fusion protein-KBD | |
| | q.s. | | Preservative |

| | | | |
|---|---|---|---|
| A | 4.00 | Uvinul MC 80 | Ethylhexyl Cinnamate |
| | 2.00 | Uvinul T 150 | Ethyl Hexyl Triazone |
| | 2.00 | Uvinul A Plus | Diethylamino Hydroxybenzoyl Hexyl |
| | | | Benzoate |
| | 0.80 | Rylo PG 11 | Polyglyceryl Dimer Soyate |
| | 1.00 | Span 60 | Sorbitan Stearate |
| | 0.50 | Vitamin E acetate | Tocopheryl Acetate |
| | 3.00 | Dracorin 100 SE | Glyceryl Stearate, PEG-100 Stearate |
| | 1.00 | Cremophor CO 410 | PEG-40 Hydrogenated Castor Oil |
| B | 3.00 | T-Lite SF | Titanium Dioxide, Alumina Hydrate, |
| | | | Dimethicone/Methicone Copolymer |
| | 1.00 | Cetiol SB 45 | Butyrospermum Parkii (Shea Butter) |
| | 6.50 | Finsolv TN | C12-15 Alkyl Benzoate |
| C | 5.00 | Butylene Glycol | Butylene Glycol |
| | 0.30 | Keltrol | Xanthan Gum |
| | 0.10 | Edeta BD | Disodium EDTA |
| | 0.10 | Allantoin | Allantoin |
| | 66.20 | Water demin. | Aqua dem. |
| D | 2.00 | Simulgel NS | Hydroxyethyl Acrylate/Sodium |
| | | | Acryloyldimethyl Taurate |
| | | | Copolymer, Squalane, Polysorbate 60 |
| | 1% | Fusion protein-KBD | |
| | q.s. | | Preservative |

| | | | |
|---|---|---|---|
| A | 4.00 | Uvinul MC 80 | Ethylhexyl Cinnamate |
| | 2.00 | Uvinul T 150 | Ethyl Hexyl Triazone |
| | 2.00 | Uvinul A Plus | Diethylamino Hydroxybenzoyl Hexyl |
| | | | Benzoate |
| | 0.80 | Rylo PG 11 | Polyglyceryl Dimer Soyate |
| | 1.00 | Span 60 | Sorbitan Stearate |
| | 0.50 | Vitamin E acetate | Tocopheryl Acetate |
| | 3.00 | Dracorin 100 SE | Glyceryl Stearate, PEG-100 Stearate |
| | 1.00 | Cremophor CO 410 | PEG-40 Hydrogenated Castor Oil |
| B | 3.00 | Z-COTE MAX | Zinc Oxide (and) Diphenyl Capryl |
| | | | Methicone |
| | 1.00 | Cetiol SB 45 | Butyrospermum Parkii (Shea Butter) |
| | 6.50 | Finsolv TN | C12-15 Alkyl Benzoate |
| C | 5.00 | Butylene Glycol | Butylene Glycol |
| | 0.30 | Keltrol | Xanthan Gum |
| | 0.10 | Edeta BD | Disodium EDTA |
| | 0.10 | Allantoin | Allantoin |
| | 66.20 | Water demin. | Aqua dem. |
| D | 2.00 | Simulgel NS | Hydroxyethyl Acrylate/Sodium |
| | | | Acryloyldimethyl Taurate |
| | | | Copolymer, Squalane, Polysorbate 60 |
| | 1% | Fusion protein-KBD | |
| | q.s. | | Preservative |

| | | | |
|---|---|---|---|
| A | 4.00 | Uvinul MC 80 | Ethylhexyl Cinnamate |
| | 1.00 | Uvinul T 150 | Ethyl Hexyl Triazone |
| | 2.00 | Parsol 1789 | Butyl Methoxydibenzoylmethane |
| | 0.80 | Rylo PG 11 | Polyglyceryl Dimer Soyate |
| | 1.00 | Span 60 | Sorbitan Stearate |
| | 0.50 | Vitamin E acetate | Tocopheryl Acetate |
| | 3.00 | Dracorin 100 SE | Glyceryl Stearate, PEG-100 Stearate |
| | 1.00 | Cremophor CO 410 | PEG-40 Hydrogenated Castor Oil |
| B | 3.00 | T-Lite SF-S | Titanium Dioxide, Silica Hydrate, |
| | | | Alumina Hydrate, Methicone/ |
| | | | Dimethicone Copolymer |
| | 1.00 | Cetiol SB 45 | Butyrospermum Parkii (Shea Butter) |
| | 6.50 | Finsolv TN | C12-15 Alkyl Benzoate |
| C | 5.00 | Butylene Glycol | Butylene Glycol |
| | 0.30 | Keltrol | Xanthan Gum |
| | 0.10 | Edeta BD | Disodium EDTA |
| | 0.10 | Allantoin | Allantoin |
| | 66.70 | Water demin. | Aqua dem. |
| D | 2.00 | Simulgel NS | Hydroxyethyl Acrylate/Sodium |
| | | | Acryloyldimethyl Taurate |
| | | | Copolymer, Squalane, Polysorbate 60 |
| | 0.5% | Fusion protein-KBD | |
| | q.s. | | Preservative |

| | | | |
|---|---|---|---|
| A | 4.00 | Uvinul MC 80 | Ethylhexyl Cinnamate |
| | 1.00 | Uvinul T 150 | Ethyl Hexyl Triazone |
| | 2.00 | Parsol 1789 | Butyl Methoxydibenzoylmethane |
| | 0.80 | Rylo PG 11 | Polyglyceryl Dimer Soyate |
| | 1.00 | Span 60 | Sorbitan Stearate |
| | 0.50 | Vitamin E acetate | Tocopheryl Acetate |
| | 3.00 | Dracorin 100 SE | Glyceryl Stearate, PEG-100 Stearate |
| | 1.00 | Cremophor CO 410 | PEG-40 Hydrogenated Castor Oil |
| B | 3.00 | Z-COTE MAX | Zinc Oxide (and) Diphenyl Capryl |
| | | | Methicone |
| | 1.00 | Cetiol SB 45 | Butyrospermum Parkii (Shea Butter) |
| | 6.50 | Finsolv TN | C12-15 Alkyl Benzoate |
| C | 5.00 | Butylene Glycol | Butylene Glycol |
| | 0.30 | Keltrol | Xanthan Gum |
| | 0.10 | Edeta BD | Disodium EDTA |
| | 0.10 | Allantoin | Allantoin |
| | 67.10 | Water demin. | Aqua dem. |
| D | 2.00 | Simulgel NS | Hydroxyethyl Acrylate/Sodium |
| | | | Acryloyldimethyl Taurate |
| | | | Copolymer, Squalane, Polysorbate 60 |
| | 0.1% | Fusion protein-KBD | |
| | q.s. | | Preservative |

| | | | |
|---|---|---|---|
| A | 5.00 | Uvinul N 539 T | Octocrylene |
| | 2.00 | Parsol 1789 | Butyl Methoxydibenzoylmethane |
| | 0.80 | Rylo PG 11 | Polyglyceryl Dimer Soyate |
| | 1.00 | Span 60 | Sorbitan Stearate |
| | 0.50 | Vitamin E acetate | Tocopheryl Acetate |
| | 3.00 | Dracorin 100 SE | Glyceryl Stearate, PEG-100 Stearate |
| | 1.00 | Cremophor CO 410 | PEG-40 Hydrogenated Castor Oil |
| B | 3.00 | T-Lite SF-S | Titanium Dioxide, Silica Hydrate, |
| | | | Alumina Hydrate, Methicone/ |
| | | | Dimethicone Copolymer |
| | 1.00 | Cetiol SB 45 | Butyrospermum Parkii (Shea Butter) |
| | 6.50 | Finsolv TN | C12-15 Alkyl Benzoate |
| C | 5.00 | Butylene Glycol | Butylene Glycol |
| | 0.30 | Keltrol | Xanthan Gum |
| | 0.10 | Edeta BD | Disodium EDTA |
| | 0.10 | Allantoin | Allantoin |
| | 66.20 | Water demin. | Aqua dem. |
| D | 2.00 | Simulgel NS | Hydroxyethyl Acrylate/Sodium |
| | | | Acryloyldimethyl Taurate |
| | | | Copolymer, Squalane, Polysorbate 60 |
| | 1% | Fusion protein-KBD | |
| | q.s. | | Preservative |

| | | | |
|---|---|---|---|
| A | 5.00 | Uvinul N 539 T | Octocrylene |
| | 2.00 | Uvinul A Plus | Diethylamino Hydroxybenzoyl Hexyl |
| | | | Benzoate |
| | 0.80 | Rylo PG 11 | Polyglyceryl Dimer Soyate |
| | 1.00 | Span 60 | Sorbitan Stearate |
| | 0.50 | Vitamin E acetate | Tocopheryl Acetate |
| | 3.00 | Dracorin 100 SE | Glyceryl Stearate, PEG-100 Stearate |
| | 1.00 | Cremophor CO 410 | PEG-40 Hydrogenated Castor Oil |
| B | 3.00 | T-Lite SF | Titanium Dioxide, Alumina Hydrate, |
| | | | Dimethicone/Methicone Copolymer |
| | 1.00 | Cetiol SB 45 | Butyrospermum Parkii (Shea Butter) |
| | 6.50 | Finsolv TN | C12-15 Alkyl Benzoate |
| C | 5.00 | Butylene Glycol | Butylene Glycol |
| | 0.30 | Keltrol | Xanthan Gum |
| | 0.10 | Edeta BD | Disodium EDTA |
| | 0.10 | Allantoin | Allantoin |
| | 65.20 | Water demin. | Aqua dem. |
| D | 2.00 | Simulgel NS | Hydroxyethyl Acrylate/Sodium |
| | | | Acryloyldimethyl Taurate |
| | | | Copolymer, Squalane, Polysorbate 60 |
| | 2% | Fusion protein-KBD | |
| | q.s. | | Preservative |

| | | | |
|---|---|---|---|
| A | 5.00 | Uvinul N 539 T | Octocrylene |
| | 2.00 | Uvinul A Plus | Diethylamino Hydroxybenzoyl Hexyl |
| | | | Benzoate |
| | 0.80 | Rylo PG 11 | Polyglyceryl Dimer Soyate |
| | 1.00 | Span 60 | Sorbitan Stearate |
| | 0.50 | Vitamin E acetate | Tocopheryl Acetate |
| | 3.00 | Dracorin 100 SE | Glyceryl Stearate, PEG-100 Stearate |
| | 1.00 | Cremophor CO 410 | PEG-40 Hydrogenated Castor Oil |
| B | 3.00 | Z-COTE MAX | Zinc Oxide(and) Diphenyl Capryl |
| | | | Methicone |
| | 1.00 | Cetiol SB 45 | Butyrospermum Parkii (Shea Butter) |
| | 6.50 | Finsolv TN | C12-15 Alkyl Benzoate |
| C | 5.00 | Butylene Glycol | Butylene Glycol |
| | 0.30 | Keltrol | Xanthan Gum |
| | 0.10 | Edeta BD | Disodium EDTA |
| | 0.10 | Allantoin | Allantoin |
| | 66.70 | Water demin. | Aqua dem. |
| D | 2.00 | Simulgel NS | Hydroxyethyl Acrylate/Sodium |
| | | | Acryloyldimethyl Taurate |
| | | | Copolymer, Squalane, Polysorbate 60 |
| | 0.5% | Fusion protein-KBD | |
| | q.s. | | Preservative |

| | | | |
|---|---|---|---|
| A | 5.00 | Uvinul N 539 T | Octocrylene |
| | 2.00 | Uvinul A Plus | Diethylamino Hydroxybenzoyl Hexyl |
| | | | Benzoate |
| | 0.80 | Rylo PG 11 | Polyglyceryl Dimer Soyate |
| | 1.00 | Span 60 | Sorbitan Stearate |
| | 0.50 | Vitamin E acetate | Tocopheryl Acetate |
| | 3.00 | Dracorin 100 SE | Glyceryl Stearate, PEG-100 Stearate |
| | 1.00 | Cremophor CO 410 | PEG-40 Hydrogenated Castor Oil |
| B | 3.00 | Z-COTE MAX | Zinc Oxide (and) Diphenyl Capryl |
| | | | Methicone |
| | 1.00 | Cetiol SB 45 | Butyrospermum Parkii (Shea Butter) |
| | 6.50 | Finsolv TN | C12-15 Alkyl Benzoate |
| C | 5.00 | Butylene Glycol | Butylene Glycol |
| | 0.30 | Keltrol | Xanthan Gum |
| | 0.10 | Edeta BD | Disodium EDTA |
| | 0.10 | Allantoin | Allantoin |
| | 2.0 | Mexoryl SX | Terephthalidene Dicamphor Sulfonic |
| | | | Acid |
| | 66.20 | Water demin. | Aqua dem. |
| D | 2.00 | Simulgel NS | Hydroxyethyl Acrylate/Sodium |
| | | | Acryloyldimethyl Taurate Copolymer, |
| | | | Squalane, Polysorbate 60 |
| | 1% | Fusion protein-KBD | |
| | q.s. | | Preservative |

| | | | |
|---|---|---|---|
| A | 5.00 | Uvinul N 539 T | Octocrylene |
| | 2.00 | Uvinul A Plus | Diethylamino Hydrobenzoyl Hexyl |
| | | | Benzoate |
| | 0.80 | Rylo PG 11 | Polyglyceryl Dimer Soyate |
| | 1.00 | Span 60 | Sorbitan Stearate |
| | 0.50 | Vitamin E acetate | Tocopheryl Acetate |
| | 3.00 | Dracorin 100 SE | Glyceryl Stearate, PEG-100 Stearate |
| | 1.00 | Cremophor CO 410 | PEG-40 Hydrogenated Castor Oil |
| B | 3.00 | Z-COTE MAX | Zinc Oxide (and) Diphenyl Capryl |
| | | | Methicone |
| | 1.00 | Cetiol SB 45 | Butyrospermum Parkii (Shea Butter) |
| | 6.50 | Finsolv TN | C12-15 Alkyl Benzoate |
| C | 5.00 | Butylene Glycol | Butylene Glycol |
| | 0.30 | Keltrol | Xanthan Gum |
| | 0.10 | Edeta BD | Disodium EDTA |
| | 0.10 | Allantoin | Allantoin |
| | 2.0 | Mexoryl SX | Terephthalidene Dicamphor Sulfonic |
| | | | Acid |
| | 65.20 | Water demin. | Aqua dem. |
| D | 2.00 | Simulgel NS | Hydroxyethyl Acrylate/Sodium |
| | | | Acryloyldimethyl Taurate Copolymer, |
| | | | Squalane, Polysorbate 60 |
| | 2% | Fusion protein-KBD | |
| | q.s. | | Preservative |

| | | | |
|---|---|---|---|
| A | 5.00 | Uvinul N 539 T | Octocrylene |
| | 2.00 | Uvinul A Plus | Diethylamino Hydroxybenzoyl Hexyl |
| | | | Benzoate |
| | 2.00 | Mexoryl XL | Drometrizole Trisiloxane |
| | 0.80 | Rylo PG 11 | Polyglyceryl Dimer Soyate |
| | 1.00 | Span 60 | Sorbitan Stearate |
| | 0.50 | Vitamin E acetate | Tocopheryl Acetate |
| | 3.00 | Dracorin 100 SE | Glyceryl Stearate, PEG-100 Stearate |
| | 1.00 | Cremophor | PEG-40 Hydrogenated Castor Oil |
| | | CO 410 | |
| B | 3.00 | Z-COTE MAX | Zinc Oxide (and) Diphenyl Capryl |
| | | | Methicone |
| | 1.00 | Cetiol SB 45 | Butyrospermum Parkii (Shea Butter) |
| | 6.50 | Finsolv TN | C12-15 Alkyl Benzoate |
| C | 5.00 | Butylene Glycol | Butylene Glycol |
| | 0.30 | Keltrol | Xanthan Gum |
| | 0.10 | Edeta BD | Disodium EDTA |
| | 0.10 | Allantoin | Allantoin |
| | 67.10 | Water demin. | Aqua dem. |
| D | 2.00 | Simulgel NS | Hydroxyethyl Acrylate/Sodium |
| | | | Acryloyldimethyl Taurate Copolymer, |
| | | | Squalane, Polysorbate 60 |
| | 0.1% | Fusion | |
| | | protein-KBD | |
| | q.s. | | Preservative |

| | | | |
|---|---|---|---|
| A | 5.00 | Uvinul N 539 T | Octocrylene |
| | 2.00 | Tinosorb S | Bis-Ethylhexyloxyphenol |
| | | | Methoxyphenyl Triazine |
| | 0.80 | Rylo PG 11 | Polyglyceryl Dimer Soyate |
| | 1.00 | Span 60 | Sorbitan Stearate |
| | 0.50 | Vitamin E acetate | Tocopheryl Acetate |
| | 3.00 | Dracorin 100 SE | Glyceryl Stearate, PEG-100 Stearate |
| | 1.00 | Cremophor CO 410 | PEG-40 Hydrogenated Castor Oil |
| B | 3.00 | Z-COTE MAX | Zinc Oxide (and) Diphenyl Capryl |
| | | | Methicone |
| | 1.00 | Cetiol SB 45 | Butyrospermum Parkii (Shea Butter) |
| | 6.50 | Finsolv TN | C12-15 Alkyl Benzoate |
| C | 5.00 | Butylene Glycol | Butylene Glycol |
| | 0.30 | Keltrol | Xanthan Gum |
| | 0.10 | Edeta BD | Disodium EDTA |
| | 0.10 | Allantoin | Allantoin |
| | 66.20 | Water demin. | Aqua dem. |
| D | 2.00 | Simulgel NS | Hydroxyethyl Acrylate/Sodium |
| | | | Acryloyldimethyl Taurate Copolymer, |
| | | | Squalane, Polysorbate 60 |
| | 1% | Fusion protein-KBD | |
| | q.s. | | Preservative |

| | | | |
|---|---|---|---|
| A | 7.50 | Uvinul MC 80 | Ethylhexyl Methoxycinnamate |
| | 5.00 | Uvinul N 539 T | Octocrylene |
| | 3.00 | Emulgade PL 68/50 | Cetearyl Glucoside, Cetearyl Alcohol |
| | 2.00 | Dracorin 100 SE | Glyceryl Stearate, PEG-100 Stearate |
| | 1.00 | Fitoderm | Squalane |
| | 0.50 | Cremophor WO 7 | PEG-7 Hydrogenated Castor Oil |
| | 0.50 | Cremophor PS 20 | Polysorbate 20 |
| | 2.00 | Dry Flo Pure | Aluminum Starch Octenylsuccinate |
| B | 5.00 | Z-COTE MAX | Zinc Oxide (and) Diphenyl Capryl |
| | | | Methicone |
| C | 4.00 | 1,2-Propylene | Propylene Glycol |
| | | Glycol Care | |
| | 0.20 | Keltrol | Xanthan Gum |
| | 0.50 | Simulgel 600 | Acrylamide/Sodium |
| | | | Acryloyldimethyltaurate Copolymer, |
| | | | Isohexadecane, Polysorbate 80 |
| | ad 100 | Water demin. | Aqua dem. |
| | q.s. | Preservative | |
| | 0.50 | Vitamin E acetate | Tocopheryl Acetate |
| | 2% | Fusion protein-KBD | |
| | 1.00 | RetiSTAR | Caprylic/Capric Triglyceride, Sodium |
| | | | Ascorbate, Tocopherol, Retinol |

| | | | |
|---|---|---|---|
| A | 7.50 | Uvinul MC 80 | Ethylhexyl Methoxycinnamate |
| | 2.00 | Uvinul N 539 T | Octocrylene |
| | 3.00 | Emulgade PL 68/50 | Cetearyl Glucoside, Cetearyl Alcohol |
| | 2.00 | Dracorin 100 SE | Glyceryl Stearate, PEG-100 Stearate |
| | 1.00 | Fitoderm | Squalane |
| | 0.50 | Cremophor WO 7 | PEG-7 Hydrogenated Castor Oil |
| | 0.50 | Cremophor PS 20 | Polysorbate 20 |
| | 2.00 | Dry Flo Pure | Aluminum Starch Octenylsuccinate |
| B | 5.00 | T-Lite SF-S | Titanium Dioxide, Silica Hydrate, |
| | | | Alumina Hydrate, Methicone/ |
| | | | Dimethicone Copolymer |
| C | 4.00 | 1,2-Propylene | Propylene Glycol |
| | | Glycol Care | |
| | 0.20 | Keltrol | Xanthan Gum |
| | 0.50 | Simulgel 600 | Acrylamide/Sodium |
| | | | Acryloyldimethyltaurate Copolymer, |
| | | | Isohexadecane, Polysorbate 80 |
| | ad 100 | Water demin. | Aqua dem. |
| | q.s. | Preservative | |
| | 0.50 | Vitamin E acetate | Tocopheryl Acetate |
| | 1% | Fusion protein-KBD | |
| | 2.00 | RetiSTAR | Caprylic/Capric Triglyceride, Sodium |
| | | | Ascorbate, Tocopherol, Retinol |

| | | | |
|---|---|---|---|
| A | 7.50 | Uvinul MC 80 | Ethylhexyl Methoxycinnamate |
| | 5.00 | Uvinul N 539 T | Octocrylene |
| | 3.00 | Emulgade PL 68/50 | Cetearyl Glucoside, Cetearyl Alcohol |
| | 2.00 | Dracorin 100 SE | Glyceryl Stearate, PEG-100 Stearate |
| | 1.00 | Fitoderm | Squalane |
| | 0.50 | Cremophor WO 7 | PEG-7 Hydrogenated Castor Oil |
| | 0.50 | Cremophor PS 20 | Polysorbate 20 |
| | 2.00 | Dry Flo Pure | Aluminum Starch Octenylsuccinate |
| B | 5.00 | T-Lite SF | Titanium Dioxide, Alumina Hydrate, |
| | | | Dimethicone/Methicone Copolymer |
| C | 4.00 | 1,2-Propylene | Propylene Glycol |
| | | Glycol Care | |
| | 1.00 | D-Panthenol 50 P | Panthenol, Propylene Glycol |
| | 0.20 | Keltrol | Xanthan Gum |
| | 0.50 | Simulgel 600 | Acrylamide/Sodium |
| | | | Acryloyldimethyltaurate Copolymer, |
| | | | Isohexadecane, Polysorbate 80 |
| | ad 100 | Water demin. | Aqua dem. |
| | q.s. | Preservative | |
| | 0.50 | Vitamin E acetate | Tocopheryl Acetate |
| | 1% | Fusion protein-KBD | |
| | 1.00 | RetiSTAR | Caprylic/Capric Triglyceride, Sodium |
| | | | Ascorbate, Tocopherol, Retinol |

| | | | |
|---|---|---|---|
| A | 5.50 | Uvinul MC 80 | Ethylhexyl Methoxycinnamate |
| | 2.00 | Uvinul A Plus | Diethylamino Hydroxybenzoyl Hexyl |
| | | | Benzoate |
| | 3.00 | Uvinul N 539 T | Octocrylene |
| | 3.00 | Emulgade PL 68/50 | Cetearyl Glucoside, Cetearyl Alcohol |
| | 2.00 | Dracorin 100 SE | Glyceryl Stearate, PEG-100 Stearate |
| | 1.00 | Fitoderm | Squalane |
| | 0.50 | Cremophor WO 7 | PEG-7 Hydrogenated Castor Oil |
| | 0.50 | Cremophor PS 20 | Polysorbate 20 |
| | 2.00 | Dry Flo Pure | Aluminum Starch Octenylsuccinate |
| B | 5.00 | T-Lite SF | Titanium Dioxide, Alumina Hydrate, |
| | | | Dimethicone/Methicone Copolymer |
| C | 4.00 | 1,2-Propylene | Propylene Glycol |
| | | Glycol Care | |
| | 0.20 | Keltrol | Xanthan Gum |
| | 0.50 | Simulgel 600 | Acrylamide/Sodium |
| | | | Acryloyldimethyltaurate Copolymer, |
| | | | Isohexadecane, Polysorbate 80 |
| | ad 100 | Water demin. | Aqua dem. |
| | q.s. | Preservative | |
| | 0.50 | Vitamin E acetate | Tocopheryl Acetate |
| | 2% | Fusion protein-KBD | |
| | 1.00 | RetiSTAR | Caprylic/Capric Triglyceride, Sodium |
| | | | Ascorbate, Tocopherol, Retinol |

| | | | |
|---|---|---|---|
| A | 1.00 | Abil Care 85 | Bis-PEG/PPG-16/16 PEG/PPG-16/16 |
| | | | Dimethicone, Caprylic/Capric |
| | | | Triglyceride |
| | 3.00 | Cremophor CO 40 | PEG-40 Hydrogenated Castor Oil |
| | 0.30 | Cremophor WO 7 | PEG-7 Hydrogenated Castor Oil |
| | 2.00 | Parsol 1789 | Butyl Methoxydibenzoylmethane |
| | 2.00 | Mexoryl XL | Drometrizole Trisiloxane |
| | 10.00 | Witconol APM | PPG-3 Myristyl Ether |
| | 1.00 | Uvinul T 150 | Ethylhexyl Triazone |
| | 1.00 | Dow Corning 345 | Cyclopentasiloxane, Cyclohexasiloxane |
| | | Fluid | |
| | 5.00 | Uvinul N 539 T | Octocrylene |

| | | | |
|---|---|---|---|
| B | 3.00 | Z-COTE MAX | Zinc Oxide (and) Diphenyl Capryl |
| | | | Methicone |
| C | 5.00 | 1,2-Propylene Glycol | Propylene Glycol |
| | 1.00 | Mexoryl SX | Terephthalidene Dicamphor |
| | | | Sulfanic Acid |
| | 0.20 | Keltrol | Xanthan Gum |
| | 0.06 | Edeta BD | Disodium EDTA |
| | 0.04 | TEA | Triethanolamine |
| | 0.30 | Carbopol Ultrez 10P | Carbomer |
| | 63.50 | Water demin. | Aqua dem. |
| | 1% | Fusion protein-KBD | |
| D | q.s. | Perfume oil | |
| | 0.50 | Glydant | DMDM Hydantoin |

| | | | |
|---|---|---|---|
| A | 5.50 | Uvinul MC 80 | Ethylhexyl Methoxycinnamate |
| | 2.00 | Uvinul A Plus | Diethylamino Hydroxybenzoyl Hexyl |
| | | | Benzoate |
| | 3.00 | Uvinul N 539 T | Octocrylene |
| | 3.00 | Emulgade | Cetearyl Glucoside, Cetearyl Alcohol |
| | | PL 68/50 | |
| | 2.00 | Dracorin 100 SE | Glyceryl Stearate, PEG-100 Stearate |
| | 1.00 | Fitoderm | Squalane |
| | 0.50 | Cremophor WO 7 | PEG-7 Hydrogenated Castor Oil |
| | 0.50 | Cremophor PS 20 | Polysorbate 20 |
| | 2.00 | Dry Flo Pure | Aluminum Starch Octenylsuccinate |
| B | 5.00 | T-Lite SF-S | Titanium Dioxide, Silica Hydrate, |
| | | | Alumina Hydrate, Methicone/ |
| | | | Dimethicone Copolymer |
| C | 4.00 | 1,2-Propylene | Propylene Glycol |
| | | Glycol Care | |
| | 0.20 | Keltrol | Xanthan Gum |
| | 2.00 | Simulgel NS | Hydroxyethyl Acrylate/Sodium |
| | | | Acryloyldimethyl Taurate Copolymer, |
| | | | Squalane, Polysorbate 60 |
| | 66.30 | Water demin. | Aqua dem. |
| | q.s. | Preservative | |
| | 0.50 | Vitamin E acetate | Tocopheryl Acetate |
| | 0.5% | Fusion | |
| | | protein-KBD | |
| | 1.00 | RetiSTAR | Caprylic/Capric Triglyceride, Sodium |
| | | | Ascorbate, Tocopherol, Retinol |

| | | | |
|---|---|---|---|
| A | 2.00 | Cremophor A 6 | Ceteareth-6, Stearyl Alcohol |
| | 2.00 | Cremophor A 25 | Ceteareth-25 |
| | 3.00 | Syncrowax HRC | Tribehenin |
| | 2.00 | Lanette O | Cetearyl Alcohol |
| | 2.00 | Luvitol EHO | Cetearyl Ethylhexanoate |
| | 5.00 | Uvinul MC 80 | Ethylhexyl Methoxycinnamate |
| | 1.00 | Ganex V-220 | VP/Eicosene Copolymer |
| | 7.00 | Isopropyl | Isopropyl Palmitate |
| | | Palmitate | |
| B | 3.00 | Z-COTE MAX | Zinc Oxide (and) Diphenyl Capryl |
| | | | Methicone |
| C | 0.20 | Keltrol | Xanthan Gum |
| | 0.50 | Simulgel NS | Hydroxyethyl Acrylate/Sodium |
| | | | Acryloyldimethyl Taurate Copolymer, |
| | | | Squalane, Polysorbate 60 |
| | 65.10 | Water demin. | Aqua dem. |
| | 0.20 | Edeta BD | Disodium EDTA |
| | 5.00 | 1,2-Propylene | Propylene Glycol |
| | | Glycol Care | |
| | 0.5% | Fusion | |
| | | protein-KBD | |
| D | 1.00 | Vitamin E acetate | Tocopheryl Acetate |
| | q.s. | Preservative | |

| | | | |
|---|---|---|---|
| A | 2.00 | Cremophor A 6 | Ceteareth-6, Stearyl Alcohol |
| | 2.00 | Cremophor A 25 | Ceteareth-25 |
| | 3.00 | Syncrowax HRC | Tribehenin |
| | 2.00 | Lanette O | Cetearyl Alcohol |
| | 2.00 | Luvitol EHO | Cetearyl Ethylhexanoate |
| | 5.00 | Uvinul MC 80 | Ethylhexyl Methoxycinnamate |
| | 1.00 | Ganex V-220 | VP/Eicosene Copolymer |
| | 7.00 | Isopropyl | Isopropyl Palmitate |
| | | Palmitate | |
| B | 3.00 | T-Lite SF | Titanium Dioxide, Alumina Hydrate, |
| | | | Dimethicone/Methicone Copolymer |
| C | 0.50 | Keltrol | Xanthan Gum |
| | 0.50 | Simulgel NS | Hydroxyethyl Acrylate/Sodium |
| | | | Acryloyldimethyl Taurate Copolymer, |
| | | | Squalane, Polysorbate 60 |
| | 65.10 | Water demin. | Aqua dem. |
| | 0.20 | Edeta BD | Disodium EDTA |
| | 5.00 | 1,2-Propylene | Propylene Glycol |
| | | Glycol Care | |
| | 0.5% | Fusion | |
| | | protein-KBD | |
| D | 1.00 | Vitamin E acetate | Tocopheryl Acetate |
| | q.s. | Preservative | |

| | | | |
|---|---|---|---|
| A | 2.00 | Cremophor A 6 | Ceteareth-6, Stearyl Alcohol |
| | 2.00 | Cremophor A 25 | Ceteareth-25 |
| | 3.00 | Syncrowax HRC | Tribehenin |
| | 2.00 | Lanette O | Cetearyl Alcohol |
| | 2.00 | Luvitol EHO | Cetearyl Ethylhexanoate |
| | 5.00 | Uvinul MC 80 | Ethylhexyl Methoxycinnamate |
| | 1.00 | Ganex V-220 | VP/Eicosene Copolymer |
| | 7.00 | Isopropyl Palmitate | Isopropyl Palmitate |
| B | 3.00 | T-Lite SF-S | Titanium Dioxide, Silica Hydrate, |
| | | | Alumina Hydrate, Methicone/ |
| | | | Dimethicone Copolymer |
| C | 0.50 | Keltrol | Xanthan Gum |
| | 0.50 | Simulgel NS | Hydroxyethyl Acrylate/Sodium |
| | | | Acryloyldimethyl Taurate Copolymer, |
| | | | Squalane, Polysorbate 60 |
| | 64.60 | Water demin. | Aqua dem. |
| | 0.20 | Edeta BD | Disodium EDTA |
| | 5.00 | 1,2-Propylene | Propylene Glycol |
| | | Glycol Care | |
| | 1% | Fusion protein-KBD | |
| D | 1.00 | Vitamin E acetate | Tocopheryl Acetate |
| | q.s. | Preservative | |

| | | | |
|---|---|---|---|
| A | 2.00 | Cremophor A 6 | Ceteareth-6, Stearyl Alcohol |
| | 2.00 | Cremophor A 25 | Ceteareth-25 |
| | 3.00 | Syncrowax HRC | Tribehenin |
| | 2.00 | Lanette O | Cetearyl Alcohol |
| | 2.00 | Luvitol EHO | Cetearyl Ethylhexanoate |
| | 5.00 | Uvinul MC 80 | Ethylhexyl Methoxycinnamate |
| | 1.00 | Ganex V-220 | VP/Eicosene Copolymer |
| | 7.00 | Isopropyl Palmitate | Isopropyl Palmitate |
| B | 3.00 | T-Lite SF-S | Titanium Dioxide, Silica Hydrate, |
| | | | Alumina Hydrate, Methicone/ |
| | | | Dimethicone Copolymer |
| C | 0.50 | Keltrol | Xanthan Gum |
| | 0.50 | Simulgel NS | Hydroxyethyl Acrylate/Sodium |
| | | | Acryloyldimethyl Taurate Copolymer, |
| | | | Squalane, Polysorbate 60 |
| | 64.10 | Water demin. | Aqua dem. |
| | 2.00 | Neoheliopan AP | Disodium Phenyl Dibenzimidazole |
| | | | Tetrasulfonate |
| | 0.20 | Edeta BD | Disodium EDTA |
| | 5.00 | 1,2-Propylene | Propylene Glycol |
| | | Glycol Care | |
| D | 1.00 | Vitamin E acetate | Tocopheryl Acetate |
| | 1% | Fusion protein-KBD | |
| | q.s. | Preservative | |

| | | | |
|---|---|---|---|
| A | 2.00 | Cremophor A 6 | Ceteareth-6, Stearyl Alcohol |
| | 2.00 | Cremophor A 25 | Ceteareth-25 |
| | 3.00 | Syncrowax HRC | Tribehenin |
| | 2.00 | Lanette O | Cetearyl Alcohol |
| | 2.00 | Luvitol EHO | Cetearyl Ethylhexanoate |
| | 7.00 | Uvinul N 539 T | Octocrylene |
| | 1.00 | Ganex V-220 | VP/Eicosene Copolymer |
| | 7.00 | Isopropyl Palmitate | Isopropyl Palmitate |
| B | 3.00 | T-Lite SF-S | Titanium Dioxide, |
| | | | Silica Hydrate, Alumina |
| | | | Hydrate, |
| | | | Methicone/Dimethicone |
| | | | Copolymer |
| C | 0.50 | Keltrol | Xanthan Gum |
| | 0.50 | Simulgel NS | Hydroxyethyl Acrylate/Sodium |
| | | | Acryloyldimethyl Taurate |
| | | | Copolymer, |
| | | | Squalane, Polysorbate 60 |
| | 64.60 | Water demin. | Aqua dem. |
| | 1.00 | Mexoryl SX | Terephthalidene Dicamphor |
| | | | Sulfonic Acid |
| | 0.20 | Edeta BD | Disodium EDTA |
| | 5.00 | 1,2-Propylene Glycol Care | Propylene Glycol |
| D | 1.00 | Vitamin E acetate | Tocopheryl Acetate |
| | 1% | Fusion protein-KBD | |
| | q.s. | Preservative | |

| | | | |
|---|---|---|---|
| A | 2.00 | Cremophor A 6 | Ceteareth-6, Stearyl Alcohol |
| | 2.00 | Cremophor A 25 | Ceteareth-25 |
| | 3.00 | Syncrowax HRC | Tribehenin |
| | 2.00 | Lanette O | Cetearyl Alcohol |
| | 2.00 | Luvitol EHO | Cetearyl Ethylhexanoate |
| | 2.00 | Mexoryl XL | Drometrizole Trisiloxane |
| | 5.00 | Uvinul N 539 T | Octocrylene |
| | 1.00 | Ganex V-220 | VP/Eicosene Copolymer |
| | 7.00 | Isopropyl | Isopropyl Palmitate |
| | | Palmitate | |
| B | 3.00 | T-Lite SF | Titanium Dioxide, Alumina Hydrate, |
| | | | Dimethicone/Methicone Copolymer |
| C | 0.50 | Keltrol | Xanthan Gum |
| | 0.50 | Simulgel NS | Hydroxyethyl Acrylate/Sodium |
| | | | Acryloyldimethyl Taurate |
| | | | Copolymer, |
| | | | Squalane, Polysorbate 60 |
| | 65.10 | Water demin. | Aqua dem. |
| | 0.20 | Edeta BD | Disodium EDTA |
| | 5.00 | 1,2-Propylene | Propylene Glycol |
| | | Glycol Care | |
| D | 1.00 | Vitamin E acetate | Tocopheryl Acetate |
| | 0.5% | Fusion | |
| | | protein-KBD | |
| | q.s. | Preservative | |

| | | | |
|---|---|---|---|
| | 1.00 | Urea | Urea |
| | 2.00 | Neoheliopan AP | Disodium Phenyl Dibenzimidazole |
| | | | Tetrasulfonate |
| | 2.00 | Glycerin 87% | Glycerin |
| | 1.20 | Aristoflex AVC | Ammonium Acryloyldimethyltaurate/VP |
| | | | Copolymer |
| | 71.30 | Water demin. | Aqua dem. |
| B | 3.00 | Cremophor | PEG-40 Hydrogenated Castor Oil |
| | | CO 40 | |
| | q.s. | Perfume oil | |
| | 5.00 | Miglyol 812 | Caprylic/Capric Triglyceride |
| | 2.00 | Uvinul N 539 T | Octocrylene |
| | 8.00 | Z-COTE MAX | Zinc Oxide (and)Diphenyl Capryl |
| | | | Methicone |
| | 5% | Fusion | |
| | | protein-KBD | |
| | q.s. | Preservative | |

| | | |
|---|---|---|
| 5.00 | Z-COTE MAX | Zinc Oxide (and) Diphenyl |
| | | Capryl Methicone |
| 2.00 | Parsol 1789 | Butyl Methoxydibenzoylmethane |
| 1.00 | Uvinul T150 | Ethylhexyl Triazone |
| 5.00 | Uvinul MC 80 | Ethylhexyl Methoxycinnamate |
| 2.00 | Uvinul T 539 N | Octocrylene |
| 0.50 | Abil 350 | Dimethicone |
| 2.75 | Carnico wax LT 20 | Carnauba (Copernica Cerifera) Wax, |
| | | Paraffin |
| 3.70 | Candelilla wax LT 281 LJ | Candelilla (Euphorbia Cerifera) Wax |
| 1.80 | Beeswax 3050 PH | Beeswax |
| 3.20 | TeCero wax 30445 | Microcrystalline Wax |
| 3.20 | TeCero wax 1030 K | Microcrystalline Wax |
| 1.34 | Cutina CP | Cetyl Palmitate |
| 6.40 | Vaseline | Petrolatum |
| 7.30 | Softisan 100 | Hydrogenated Coco-Glycerides |
| 10.00 | Luvitol EHO | Cetearyl Ethylhexanoate |
| 0.17 | Bisabolol nat. | Bisabolol |
| 1.84 | Vitamin E acetate | Tocopheryl Acetate |
| 0.42 | D,L-Alpha-Tocopherol | Tocopherol |
| 1% | Fusion protein-KBD | |
| 40.38 | castor oil | Castor (Ricinus Communis) Oil |

| | | |
|---|---|---|
| 5.00 | T-Lite SF | Titanium Dioxide, Alumina Hydrate, |
| | | Dimethicone/Methicone Copolymer |
| 2.00 | Parsol 1789 | Butyl Methoxydibenzoylmethane |
| 1.00 | Uvinul T150 | Ethylhexyl Triazone |
| 3.00 | Uvinul MC 80 | Ethylhexyl Methoxycinnamate |
| 2.00 | Uvinul N 539 T | Octocrylene |
| 0.50 | Abil 350 | Dimethicone |
| 2.75 | Carnico wax LT 20 | Carnauba (Copernica Cerifera) Wax, |
| | | Paraffin |
| 3.70 | Candelilla wax LT 281 LJ | Candelilla (Euphorbia Cerifera) Wax |
| 1.80 | Beeswax 3050 PH | Beeswax |
| 3.20 | TeCero wax 30445 | Microcrystalline Wax |
| 3.20 | TeCero wax 1030 K | Microcrystalline Wax |
| 1.34 | Cutina CP | Cetyl Palmitate |
| 6.40 | Vaseline | Petrolatum |
| 7.30 | Softisan 100 | Hydrogenated Coco-Glycerides |
| 10.00 | Luvitol EHO | Cetearyl Ethylhexanoate |
| 0.17 | Bisabolol nat. | Bisabolol |
| 1.84 | Vitamin E acetate | Tocopheryl Acetate |
| 0.42 | D,L-Alpha-Tocopherol | Tocopherol |
| 1% | Fusion protein-KBD | |
| 40.38 | castor oil | Castor (Ricinus Communis) Oil |

| | | |
|---|---|---|
| 5.00 | T-Lite SF-S | Titanium Dioxide, Silica Hydrate, |
| | | Alumina Hydrate, |
| | | Methicone/Dimethicone Copolymer |
| 2.00 | Uvinul A Plus | Diethylamino Hydroxybenzoyl Hexyl |
| | | Benzoate |
| 2.00 | Mexoryl XL | Drometrizole Trisiloxane |
| 3.00 | Uvinul MC 80 | Ethylhexyl Methoxycinnamate |
| 0.50 | Abil 350 | Dimethicone |
| 2.75 | Carnico wax LT 20 | Carnauba (Copernica Cerifera) Wax, |
| | | Paraffin |
| 3.70 | Candelilla wax LT 281 LJ | Candelilla (Euphorbia Cerifera) Wax |
| 1.80 | Beeswax 3050 PH | Beeswax |
| 3.20 | TeCero wax 30445 | Microcrystalline Wax |
| 3.20 | TeCero wax 1030 K | Microcrystalline Wax |
| 1.34 | Cutina CP | Cetyl Palmitate |
| 6.40 | Vaseline | Petrolatum |
| 7.30 | Softisan 100 | Hydrogenated Coco-Glycerides |
| 10.00 | Luvitol EHO | Cetearyl Ethylhexanoate |
| 0.17 | Bisabolol nat. | Bisabolol |
| 1.84 | Vitamin E acetate | Tocopheryl Acetate |
| 0.42 | D,L-Alpha-Tocopherol | Tocopherol |
| 2% | Fusion protein-KBD | |
| 39.38 | castor oil | Castor (Ricinus Communis) Oil |

| | | | |
|---|---|---|---|
| A | 6.00 | Cremophor WO 7 | PEG-7 Hydrogenated Castor Oil |
| | 2.00 | Elfacos ST 9 | PEG-45/Dodecyl Glycol Copolymer |
| | 3.00 | Isopropyl myristate | Isopropyl Myristate |
| | 8.00 | Jojoba oil | Simmondsia Chinensis (Jojoba) Seed |
| | | | Oil |
| | 4.00 | Uvinul MC 80 | Ethylhexyl Methoxycinnamate |
| | 2.00 | Uvinul A Plus | Diethylamino Hydroxybenzoyl Hexyl |
| | | | Benzoate |
| | 1.00 | Abil 350 | Dimethicone |
| B | 5.00 | Z-COTE MAX | Zinc Oxide (and) Diphenyl Capryl |
| | | | Methiconee |
| | 3.00 | T-Lite SF | Titanium Dioxide, Alumina Hydrate, |
| | | | Dimethicone/Methicone Copolymer |
| C | 0.20 | Edeta BD | Disodium EDTA |
| | 5.00 | Glycerin 87% | Glycerin |
| | 0.30 | Chemag 2000 | Imidazolidinyl Urea |
| | 59.00 | Water demin. | Aqua dem. |
| D | q.s. | Perfume oil | |
| | 1% | Fusion protein-KBD | |
| | q.s. | Preservative | |

| | | | |
|---|---|---|---|
| | 2.00 | Cremophor A 6 | Ceteareth-6, Stearyl Alcohol |
| | 2.00 | Cremophor A 25 | Ceteareth-25 |
| | 3.00 | Syncrowax HRC | Tribehenin |
| | 2.00 | Lanette O | Cetearyl Alcohol |
| | 2.00 | Luvitol EHO | Cetearyl Ethylhexanoate |
| | 5.00 | Uvinul MC 80 | Ethylhexyl Methoxycinnamate |
| | 1.00 | Uvinul T 150 | Ethythexyl Triazone |
| | 1.00 | Ganex V-220 | VP/Eicosene Copolymer |
| | 7.00 | Isopropyl myristate | Isopropyl Myristate |
| B | 5.00 | Z-COTE MAX | Zinc Oxide (and) Diphenyl |
| | | | Capryl Methicone |
| C | 0.20 | Keltrol | Xanthan Gum |
| | 0.50 | Simulgel NS | Hydroxyethyl |
| | | | Acrylate/Sodium |
| | | | Acryloyldimethyl Taurate |
| | | | Copolymer, |
| | | | Squalane, Polysorbate 60 |
| | 61.10 | Water demin. | Aqua dem. |
| | 0.20 | Edeta BD | Disodium EDTA |
| | 5.00 | 1,2-Propylene Glycol | Propylene Glycol |
| | | Care | |
| D | 1.00 | Vitamin E acetate | Tocopheryl Acetate |
| | 1.5% | Fusion protein-KBD | |
| | q.s. | Preservative | |

| | | | |
|---|---|---|---|
| A | 2.00 | Luvitol EHO | Cetearyl Ethylhexanoate |
| | 5.00 | Paraffin oil | Mineral Oil |
| | 5.00 | Z-COTE MAX | Zinc Oxide (and) Diphenyl |
| | | | Capryl |
| | | | Methicone |
| B | 1.00 | Cremophor A 6 | Ceteareth-6, Stearyl Alcohol |
| | 2.00 | Cremophor A 25 | Ceteareth-25 |
| | 3.00 | Glycerin monostearate | Glyceryl Stearate |
| | 4.00 | Cetylstearyl alcohol | Cetearyl Alcohol |
| C | 5.00 | 1,2-Propylene Glycol Care | Propylene Glycol |
| | 7.50 | Luviquat Care | Polyquaternium-44 |
| | q.s. | Preservative | |
| | q.s. | Perfume oil | |
| | 1% | Fusion protein-KBD | |
| | 64.50 | Water demin. | Aqua dem. |

| | | |
|---|---|---|
| 5.00 | T-Lite SF | Titanium Dioxide, Alumina Hydrate, |
| | | Dimethicone/Methicone Copolymer |
| 10.00 | Z-COTE MAX | Zinc Oxide (and) Diphenyl Capryl |
| | | Methicone |
| 12.00 | Beeswax 3044 PH | Beeswax |
| 8.00 | Candelilla wax LT 281 LJ | Candelilla (Euphorbia Cerifera) Wax |
| 5.00 | Tegin | Glyceryl Stearate SE |
| 5.00 | Dow Corning 345 Fluid | Cyclopentasiloxane, |
| | | Cyclohexasiloxane |
| 5.00 | Witconol APM | PPG-3 Myristyl Ether |
| 5.00 | Softisan 154 | Hydrogenated Palm Oil |
| 8.00 | Paraffin oil, high-viscosity | Mineral Oil |
| 3.00 | Vaseline | Petrolatum |
| 2% | Fusion protein-KBD | |
| 32.00 | castor oil | Castor (Ricinus Communis) Oil |

| | | |
|---|---|---|
| 3.00 | Uvinul MC 80 | Ethylhexyl Methoxycinnamate |
| 2.00 | Uvinul T 150 | Ethylhexyl Triazone |
| 2.00 | Uvinul A Plus | Diethylamino Hydroxybenzoyl |
| | | Hexyl |
| | | Benzoate |
| 10.00 | Z-COTE MAX | Zinc Oxide (and) Diphenyl Capryl |
| | | Methicone |
| 12.00 | Beeswax 3044 PH | Beeswax |
| 3.00 | Vaseline | Petrolatum |
| 8.00 | Candelilla wax LT 281 LJ | Candelilla (Euphorbia Cerifera) |
| | | Wax |
| 8.00 | Paraffin oil, high-viscosity | Mineral Oil |
| 5.00 | Tegin | Glyceryl Stearate SE |
| 5.00 | Softisan 154 | Hydrogenated Palm Oil |
| 5.00 | Witconol APM | PPG-3 Myristyl Ether |
| 5.00 | Dow Corning 345 Fluid | Cyclopentasiloxane, |
| | | Cyclohexasiloxane |
| 0.1% | Fusion protein-KBD | |
| 28.90 | castor oil | Castor (Ricinus Communis) Oil |

| | | | |
|---|---|---|---|
| | 5.00 | T-Lite SF | Titanium Dioxide, Alumina |
| | | | Hydrate, Dimethicone/Methicone |
| | | | Copolymer |
| | 6.00 | Finsolv TN | C12-15 Alkyl Benzoate |
| | 10.00 | Uvinul MC 80 | Ethylhexyl Methoxycinnamate |
| | 6.00 | Miglyol 812 | Caprylic/Capric Triglyceride |
| | 5.00 | Arlacel P 135 | PEG-30 Dipolyhydroxystearate |
| | 2.00 | Ganex V 216 | PVP/Hexadecene Copolymer |
| | 2.00 | Elfacos ST 9 | PEG-45/Dodecyl Glycol |
| | | | Copolymer |
| B | 3.00 | 1,2-Propylene | Propylene Glycol |
| | | Glycol Care | |
| | 0.10 | Edeta BD | Disodium EDTA |
| | 1.00 | Magnesium | Magnesium Sulfate |
| | | sulfate 7-hydrate | |
| | 59.40 | Water demin. | Aqua dem. |
| | 0.5% | Fusion protein-KBD | |
| | q.s. | Preservative | |

| | | | |
|---|---|---|---|
| A | 4.00 | Dehymuls SBL | Polyglyceryl-2 Dipolyhydroxystearate, |
| | | | Dicaprylyl Ether, Cocoglycerides, |
| | | | Sorbitan |
| | | | Sesquioleate, Cera Alba, Aluminum |
| | | | Stearates, Dicocoyl Pentaerythrityl |
| | | | Distearyl Citrate |
| | 1.00 | Dehymuls | Polyglyceryl-2 Dipolyhydroxystearate |
| | | PGPH | |
| | 8.00 | Finsolv TN | C12-15 Alkyl Benzoate |
| | 4.00 | Miglyol 812 | Caprylic/Capric Triglyceride |
| | 4.00 | Uvinul MC 80 | Ethylhexyl Methoxycinnamate |
| | 2.00 | Uvinul N 539 T | Octocrylene |
| B | 5.00 | Z-COTE MAX | Zinc Oxide (and) Diphenyl Capryl |
| | | | Methicone |
| C | 3.00 | 1,2-Propylene | Propylene Glycol |
| | | Glycol Care | |
| | 0.30 | Abiol | Imidazolidinyl Urea |
| | 1.00 | Magnesium | Magnesium Sulfate |
| | | sulfate 7-hydrate | |
| | ad 100 | Water demin. | Aqua dem. |
| | 1.5% | Fusion | |
| | | protein-KBD | |
| D | q.s. | Preservative | |

| | | | |
|---|---|---|---|
| A | 4.00 | Dehymuls SBL | Polyglyceryl-2 Dipolyhydroxystearate, |
| | | | Dicaprylyl Ether, Cocoglycerides, |
| | | | Sorbitan Sesquioleate, |
| | | | Cera Alba, Aluminum |
| | | | Stearates, Dicocoyl Pentaerythrityl |
| | | | Distearyl Citrate |
| | 1.00 | Dehymuls PGPH | Polyglyceryl-2 Dipolyhydroxystearate |
| | 8.00 | Finsolv TN | C12-15 Alkyl Benzoate |
| | 4.00 | Miglyol 812 | Caprylic/Capric Triglyceride |
| | 4.00 | Uvinul MC 80 | Ethylhexyl Methoxycinnamate |
| | 2.00 | Uvinul N 539 T | Octocrylene |
| B | 5.00 | T-Lite SF-S | Titanium Dioxide, |
| | | | Silica Hydrate, Alumina |
| | | | Hydrate, Methicone/Dimethicone |
| | | | Copolymer |
| C | 3.00 | 1,2-Propylene | Propylene Glycol |
| | | Glycol Care | |
| | 0.30 | Abiol | Imidazolidinyl Urea |
| | 1.00 | Magnesium | Magnesium Sulfate |
| | | sulfate 7-hydrate | |
| | 1% | Fusion | |
| | | protein-KBD | |
| | ad 100 | Water demin. | Aqua dem. |
| D | q.s. | preservative | |

| | | | |
|---|---|---|---|
| A | 4.00 | Dehymuls SBL | Polyglyceryl-2 Dipolyhydroxystearate, |
| | | | Dicaprylyl Ether, Cocoglycerides, |
| | | | Sorbitan Sesquioleate, |
| | | | Cera Alba, Aluminum |
| | | | Stearates, Dicocoyl Pentaerythrityl |
| | | | Distearyl Citrate |
| | 1.00 | Dehymuls PGPH | Polyglyceryl-2 Dipolyhydroxystearate |
| | 8.00 | Finsolv TN | C12-15 Alkyl Benzoate |
| | 4.00 | Miglyol 812 | Caprylic/Capric Triglyceride |
| | 8.00 | Uvinul A Plus B | Ethylhexyl Methoxycinnamate and |
| | | | Diethylamino Hydroxybenzoyl hexyl |
| | | | Benzoate |
| | 2.00 | Uvinul N 539 T | Octocrylene |
| B | 5.00 | Z-COTE MAX | Zinc Oxide (and) Diphenyl Capryl |
| | | | Methicone |
| C | 3.00 | 1,2-Propylene | Propylene Glycol |
| | | Glycol Care | |
| | 0.30 | Abiol | Imidazolidinyl Urea |
| | 1.00 | Magnesium | Magnesium Sulfate |
| | | sulfate 7-hydrate | |
| | 0.1% | Fusion | |
| | | protein-KBD | |
| | ad 100 | Water demin. | Aqua dem. |
| | q.s. | Preservative | |

| | | | |
|---|---|---|---|
| A | 4.00 | Dehymuls SBL | Polyglyceryl-2 Dipolyhydroxystearate, |
| | | | Dicaprylyl Ether, Cocoglycerides, Sorbitan |
| | | | Sesquioleate, Cera Alba, Aluminum |
| | | | Stearates, Dicocoyl Pentaerythrityl |
| | | | Distearyl Citrate |
| | 1.00 | Dehymuls PGPH | Polyglyceryl-2 Dipolyhydroxystearate |
| | 8.00 | Finsolv TN | C12-15 Alkyl Benzoate |
| | 4.00 | Miglyol 812 | Caprylic/Capric Triglyceride |
| | 8.00 | Uvinul A Plus B | Ethylhexyl Methoxycinnamate and |
| | | | Diethylamino Hydroxybenzoyl Hexyl |
| | | | Benzoate |
| | 2.00 | Uvinul N 539 T | Octocrylene |
| B | 5.00 | T-Lite SF | Titanium Dioxide, Alumina |
| | | | Hydrate, Dimethicone/Methicone |
| | | | Copolymer |
| C | 3.00 | 1,2-Propylene Glycol Care | Propylene Glycol |
| | 0.30 | Abiol | Imidazolidinyl Urea |
| | 1.00 | Magnesium sulfate 7-hydrate | Magnesium Sulfate |
| | ad 100 | Water demin. | Aqua dem. |
| | 0.2% | Fusion protein-KBD | |
| | q.s. | Preservative | |

| | | | |
|---|---|---|---|
| A | 4.00 | Dehymuls SBL | Polyglyceryl-2 Dipolyhydroxystearate, |
| | | | Dicaprylyl Ether, Cocoglycerides, Sorbitan |
| | | | Sesquioleate, Cera Alba, Aluminum |
| | | | Stearates, Dicocoyl Pentaerythrityl |
| | | | Distearyl Citrate |
| | 1.00 | Dehymuls PGPH | Polyglyceryl-2 Dipolyhydroxystearate |
| | 8.00 | Finsolv TN | C12-15 Alkyl Benzoate |
| | 4.00 | Miglyol 812 | Caprylic/Capric Triglyceride |
| | 8.00 | Uvinul A Plus B | Ethylhexyl Methoxycinnamate and |
| | | | Diethylamino Hydroxybenzoyl hexyl |
| | | | Benzoate |
| | 2.00 | Uvinul N 539 T | Octocrylene |
| B | 5.00 | T-Lite SF-S | Titanium Dioxide, Silica Hydrate, Alumina |
| | | | Hydrate, Methicone/Dimethicone |
| | | | Copolymer |
| C | 3.00 | 1,2-Propylene Glycol Care | Propylene Glycol |
| | 0.30 | Abiol | Imidazolidinyl Urea |
| | 1.00 | Magnesium sulfate 7-hydrate | Magnesium Sulfate |
| | 0.5% | Fusion protein-KBD | |
| | ad 100 | Water demin. | Aqua dem. |
| | q.s. | Preservative | |

| | | | |
|---|---|---|---|
| A | 4.00 | Dehymuls SBL | Polyglyceryl-2 Dipolyhydroxystearate, |
| | | | Dicaprylyl Ether, Cocoglycerides, Sorbitan |
| | | | Sesquioleate, Cera Alba, Aluminum |
| | | | Stearates, Dicocoyl Pentaerythrityl |
| | | | Distearyl Citrate |
| | 1.00 | Dehymuls PGPH | Polyglyceryl-2 Dipolyhydroxystearate |
| | 8.00 | Finsolv TN | C12-15 Alkyl Benzoate |
| | 4.00 | Miglyol 812 | Caprylic/Capric Triglyceride |
| | 7.00 | Uvinul MC 80 | Ethylhexyl Methoxycinnamate |
| | 2.00 | Mexoryl XL | Drometrizole Trisiloxane |
| B | 5.00 | Z-COTE MAX | Titanium Dioxide, Alumina Hydrate, |
| | | | Dimethicone/Methicone Copolymer |
| C | 3.00 | 1,2-Propylene Glycol Care | Propylene Glycol |
| | 0.30 | Abiol | Imidazolidinyl Urea |
| | 1.00 | Magnesium sulfate 7-hydrate | Magnesium Sulfate |
| | ad 100 | Water demin. | Aqua dem. |
| | 0.01% | Fusion protein-KBD | |
| | q.s. | Preservative | |

| | | | |
|---|---|---|---|
| A | 7.50 | Uvinul MC 80 | Ethylhexyl Methoxycinnamate |
| | 3.00 | Uvinul N 539 T | Octocrylene |
| | 2.00 | Uvinul A Plus | Diethylamino Hydroxybenzoyl Hexyl |
| | | | Benzoate |
| | 1.00 | Cremophor CO 40 | PEG-40 Hydrogenated Castor Oil |
| | 10.00 | Miglyol 812 | Caprylic/Capric Triglyceride |
| | 1.50 | Dow Corning 345 | Cyclopentasiloxane, |
| | | Fluid | Cyclohexasiloxane |
| B | 3.50 | Luvigel EM | Caprylic/Capric Triglyceride, Sodium |
| | | | Acrylates Copolymer |
| C | 46.00 | Water demin. | Aqua dem. |
| D | 5.00 | 1,2-Propylene | Propylene Glycol |
| | | Glycol Care | |
| | 0.50 | Cremophor A 25 | Ceteareth-25 |
| | 0.05% | Fusion protein-KBD | |
| | 20.00 | Ethanol 96% | Alcohol |

| | | | |
|---|---|---|---|
| A | 1.00 | Uvinul A Plus | Diethylamino Hydroxybenzoyl Hexyl |
| | | | Benzoate |
| | 1.00 | Tinosorb S | Bis-Ethylhexyloxyphenol |
| | | | Methoxyphenyl Triazine |
| | 3.00 | Uvinul MC 80 | Ethylhexyl Methoxycinnamate |
| | 8.00 | Miglyol 812 | Caprylic/Capric Triglyceride |
| | 1.50 | Dow Corning 350 | Dimethicone |
| | | Fluid | |
| | 3.00 | Z-COTE MAX | Titanium Dioxide, Alumina Hydrate, |
| | | | Dimethicone/Methicone Copolymer |
| | 3.00 | Finsolv TN | C12-15 Alkyl Benzoate |
| | 1.00 | Cremophor CO 40 | PEG-40 Hydrogenated Castor Oil |
| B | 2.00 | Luvigel EM | Caprylic/Capric Triglyceride, Sodium |
| | | | Acrylates Copolymer |
| C | 54.80 | Water demin. | Aqua dem. |
| D | 15.00 | Ethanol 96% | Alcohol |
| | 5.00 | 1,2-Propylene Glycol | Propylene Glycol |
| | | Care | |
| | 0.50 | Cremophor A 25 | Ceteareth-25 |
| | 1% | Fusion protein-KBD | |
| | 1.00 | Vitamin E acetate | Tocopheryl Acetate |
| | 0.20 | Bisabolol rac. | Bisabolol |

| | | | |
|---|---|---|---|
| A | 4.00 | Dehymuls SBL | Polyglyceryl-2 Dipolyhydroxy- |
| | | | stearate, Dicaprylyl Ether, |
| | | | Cocoglycerides, Sorbitan |
| | | | Sesquioleate, Cera Alba, Aluminum |
| | | | Stearates, Dicocoyl Pentaerythrityl |
| | | | Distearyl Citrate |
| | 1.00 | Dehymuls PGPH | Polyglyceryl-2 |
| | | | Dipolyhydroxystearate |
| | 6.00 | Finsolv TN | C12-15 Alkyl Benzoate |
| | 6.00 | Miglyol 812 | Caprylic/Capric Triglyceride |
| | 5.00 | Uvinul MC 80 | Ethylhexyl Methoxycinnamate |
| | 3.00 | Neoheliopan HMS | Homosalate |
| B | 5.00 | Z-COTE MAX | Zinc Oxide (and) Diphenyl Capryl |
| | | | Methicone |
| C | 3.00 | 1,2-Propylene | Propylene Glycol |
| | | Glycol Care | |
| | 0.30 | Chemag 2000 | Imidazolidinyl Urea |
| | 1.00 | Magnesium sulfate | Magnesium Sulfate |
| | | 7-hydrate | |
| | 65.10 | Water demin. | Aqua dem. |
| | 0.1% | Fusion protein-KBD | |
| | q.s. | Preservative | |

| | | | |
|---|---|---|---|
| A | 4.00 | Tego Care 450 | Polyglyceryl-3 Methyl Glucose |
| | | | Distearate |
| | 4.50 | Uvinul MC 80 | Ethylhexyl Methoxycinnamate |
| | 3.00 | Uvinul N 539 T | Octocrylene |
| | 2.00 | Uvinul T 150 | Ethylhexyl Triazone |
| | 0.50 | Vitamin E acetate | Tocopheryl Acetate |
| B | 5.00 | Isohexadecane | Isohexadecane |
| | 5.00 | Cosmacol EMI | Di-C12-13 Alkyl Malate |
| | 3.50 | Cetiol SN | Cetearyl Isononanoate |
| | 1.00 | Ganex V-220 | VP/Eicosene Copolymer |
| | 5.00 | T-Lite SF | Titanium Dioxide, Alumina |
| | | | Hydrate, Dimethicone/Methicone |
| | | | Copolymer |
| C | 60.00 | Water demin. | Water |
| | 5.00 | Glycerin 87% | Glycerin |
| | 1.00 | Lanette E | Sodium Cetearyl Sulfate |
| | 0.30 | Keltrol | Xanthan Gum |
| | 0.2% | Fusion protein-KBD | |
| D | q.s. | Preservative | |

| | | | |
|---|---|---|---|
| A | 4.00 | Tego Care 450 | Polyglyceryl-3 Methyl Glucose |
| | | | Distearate |
| | 4.50 | Uvinul MC 80 | Ethylhexyl Methoxycinnamate |
| | 3.00 | Uvinul N 539 T | Octocrylene |
| | 2.00 | Neoheliopan HMS | Homosalate |
| | 0.50 | Vitamin E acetate | Tocopheryl Acetate |
| B | 5.00 | Isohexadecane | Isohexadecane |
| | 5.00 | Cosmacol EMI | Di-C12-13 Alkyl Malate |
| | 3.50 | Cetiol SN | Cetearyl Isononanoate |
| | 1.00 | Ganex V-220 | VP/Eicosene Copolymer |
| | 5.00 | T-Lite SF | Titanium Dioxide, Alumina Hydrate, |
| | | | Dimethicone/Methicone Copolymer |
| C | 59.20 | Water demin. | Aqua dem. |
| | 5.00 | Glycerin 87% | Glycerin |
| | 1.00 | Lanette E | Sodium Cetearyl Sulfate |
| | 0.30 | Keltrol | Xanthan Gum |
| | 1% | Fusion protein-KBD | |
| D | q.s. | Preservative | |

| | | | |
|---|---|---|---|
| A | 4.00 | Tego Care 450 | Polyglyceryl-3 Methyl Glucose |
| | | | Distearate |
| | 4.50 | Uvinul MC 80 | Ethylhexyl Methoxycinnamate |
| | 3.00 | Neoheliopan OS | Octisalate |
| | 2.00 | Neoheliopan HMS | Homosalate |
| | 0.50 | Vitamin E acetate | Tocopheryl Acetate |
| B | 5.00 | Isohexadecane | Isohexadecane |
| | 5.00 | Cosmacol EMI | Di-C12-13 Alkyl Malate |
| | 3.50 | Cetiol SN | Cetearyl Isononanoate |
| | 1.00 | Ganex V-220 | VP/Eicosene Copolymer |
| | 5.00 | Z-COTE MAX | Zinc Oxide (and) Diphenyl Capryl |
| | | | Methicone |
| C | 60.15 | Water demin. | Aqua dem. |
| | 5.00 | Glycerin 87% | Glycerin |
| | 1.00 | Lanette E | Sodium Cetearyl Sulfate |
| | 0.30 | Keltrol | Xanthan Gum |
| | 0.05% | Fusion protein-KBD | |
| D | q.s. | Preservative | |

| | | | |
|---|---|---|---|
| A | 4.00 | Tego Care 450 | Polyglyceryl-3 Methyl Glucose |
| | | | Distearate |
| | 4.50 | Uvinul N 539 T | Octocrylene |
| | 3.00 | Neoheliopan OS | Octisalate |
| | 2.00 | Neoheliopan HMS | Homosalate |
| | 0.50 | Vitamin E acetate | Tocopheryl Acetate |
| B | 5.00 | Isohexadecane | Isohexadecane |
| | 5.00 | Cosmacol EMI | Di-C12-13 Alkyl Malate |
| | 3.50 | Cetiol SN | Cetearyl Isononanoate |
| | 1.00 | Ganex V-220 | VP/Eicosene Copolymer |
| | 5.00 | Z-COTE MAX | Zinc Oxide (and) Diphenyl Capryl |
| | | | Methicone |
| C | 60.19 | Water demin. | Aqua dem. |
| | 5.00 | Glycerin 87% | Glycerin |
| | 1.00 | Lanette E | Sodium Cetearyl Sulfate |
| | 0.30 | Keltrol | Xanthan Gum |
| | 0.01% | Fusion protein-KBD | |
| D | q.s. | Preservative | |

| | | | |
|---|---|---|---|
| A | 4.00 | Tego Care 450 | Polyglyceryl-3 Methyl Glucose |
| | | | Distearate |
| | 4.50 | Uvinul N 539 T | Octocrylene |
| | 3.00 | Neoheliopan OS | Octisalate |
| | 2.00 | Neoheliopan HMS | Homosalate |
| | 0.50 | Vitamin E acetate | Tocopheryl Acetate |
| B | 5.00 | Isohexadecane | Isohexadecane |
| | 5.00 | Cosmacol EMI | Di-C12-13 Alkyl Malate |
| | 3.50 | Cetiol SN | Cetearyl Isononanoate |
| | 1.00 | Ganex V-220 | VP/Eicosene Copolymer |
| | 5.00 | T-Lite SF-S | Titanium Dioxide, Silica Hydrate, |
| | | | Alumina Hydrate, |
| | | | Methicone/Dimethicone Copolymer |
| C | 59.20 | Water demin. | Aqua dem. |
| | 5.00 | Glycerin 87% | Glycerin |
| | 1.00 | Lanette E | Sodium Cetearyl Sulfate |
| | 0.30 | Keltrol | Xanthan Gum |
| | 1% | Fusion protein-KBD | |
| D | q.s. | Preservative | |

| | | | |
|---|---|---|---|
| A | 8.00 | Cetiol B | Dibutyl Adipate |
| | 8.00 | Finsolv TN | C12-15 Alkyl Benzoate |
| | 12.00 | Myritol 331 | Cocoglycerides |
| | 1.00 | Lanette E | Sodium Cetearyl Sulfate |
| | 4.00 | Eumulgin VL 75 | Lauryl Glucoside, Polyglyceryl-2 |
| | | | Dipolyhydroxystearate, Glycerin |
| | 2.00 | Lanette O | Cetearyl Alcohol |
| | 3.00 | Tinosorb S | Bis-Ethylhexyloxyphenol |
| | | | Methoxyphenyl Triazine |
| | 1.00 | Vitamin E acetate | Tocopheryl Acetate |
| B | 4.00 | Z-COTE MAX | Zinc Oxide (and) Diphenyl Capryl |
| | | | Methicone |
| C | 3.00 | Glycerin 87% | Glycerin |
| | 0.05 | Edeta BD | Disodium EDTA |
| | 0.20 | Allantoin | Allantoin |
| | 0.30 | Keltrol | Xanthan Gum |
| | 1.50 | Veegum Ultra | Magnesium Aluminum Silicate |
| | 49.45 | Water demin. | Aqua dem. |
| | 1% | Fusion protein-KBD | |
| D | q.s. | Preservative | |

| | | | |
|---|---|---|---|
| A | 8.00 | Cetiol B | Dibutyl Adipate |
| | 8.00 | Finsolv TN | C12-15 Alkyl Benzoate |
| | 12.00 | Myritol 331 | Cocoglycerides |
| | 1.00 | Lanette E | Sodium Cetearyl Sulfate |
| | 4.00 | Eumulgin VL 75 | Lauryl Glucoside, Polyglyceryl-2 |
| | | | Dipolyhydroxystearate, Glycerin |
| | 2.00 | Lanette O | Cetearyl Alcohol |
| | 3.00 | Tinosorb S | Bis-Ethylhexyloxyphenol |
| | | | Methoxyphenyl Triazine |
| | 1.00 | Vitamin E acetate | Tocopheryl Acetate |
| B | 4.00 | T-Lite SF | Titanium Dioxide, Alumina Hydrate, |
| | | | Dimethicone/Methicone Copolymer |
| C | 3.00 | Glycerin 87% | Glycerin |
| | 0.05 | Edeta BD | Disodium EDTA |
| | 0.20 | Allantoin | Allantoin |
| | 0.30 | Keltrol | Xanthan Gum |
| | 1.50 | Veegum Ultra | Magnesium Aluminum Silicate |
| | 50.25 | Water demin. | Aqua dem. |
| D | 0.50 | Citric acid | Citric Acid |
| | q.s. | Perfume oil | |
| | 0.2% | Fusion protein-KBD | |
| | q.s. | Preservative | |

| | | | |
|---|---|---|---|
| A | 5.00 | Cosmacol EMI | Di-C12-13 Alkyl Malate |
| | 4.50 | Uvinul MC 80 | Ethylhexyl Methoxycinnamate |
| | 3.00 | Uvinul N 539 T | Octocrylene |
| | 2.00 | Uvinul T 150 | Ethylhexyl Triazone |
| B | 4.00 | Tego Care 450 | Polyglyceryl-3 Methyl Glucose |
| | | | Distearate |
| | 5.00 | Isohexadecane | Isohexadecane |
| | 3.50 | Cetiol SN | Cetearyl Isononanoate |
| | 0.50 | Vitamin E acetate | Tocopheryl Acetate |
| | 1.00 | Ganex V-220 | VP/Eicosene Copolymer |
| | 2.50 | T-Lite SF | Titanium Dioxide, Alumina Hydrate, |
| | | | Dimethicone/Methicone Copolymer |
| C | 5.00 | Glycerin 87% | Glycerin |
| | 2.00 | Lanette E | Sodium Cetearyl Sulfate |
| | 0.30 | Keltrol | Xanthan Gum |
| | 1.00 | Pationic 138 C | Sodium Lauroyl Lactylate |
| | 1.00 | Pationic SSL | Sodium Stearoyl Lactylate |
| | 42.00 | Water demin. | Aqua dem. |
| D | 5.00 | Eusolex 232 | Phenylbenzimidazole Sulfonic Acid |
| | 10.00 | Water demin. | Aqua dem. |
| E | 0.70 | Sodium hydroxide | Sodium Hydroxide |
| | 1% | Fusion protein-KBD | |
| | q.s. | Preservative | |

| | | | |
|---|---|---|---|
| A | 5.00 | Cosmacol EMI | Di-C12-13 Alkyl Malate |
| | 4.50 | Uvinul MC 80 | Ethylhexyl Methoxycinnamate |
| | 3.00 | Uvinul N 539 T | Octocrylene |
| | 2.00 | Uvinul A Plus | Diethylamino Hydrobenzoyl Hexyl |
| | | | Benzoate |
| B | 4.00 | Tego Care 450 | Polyglyceryl-3 Methyl Glucose |
| | | | Distearate |
| | 5.00 | Isohexadecane | Isohexadecane |
| | 3.50 | Cetiol SN | Cetearyl Isononanoate |
| | 0.50 | Vitamin E acetate | Tocopheryl Acetate |
| | 1.00 | Ganex V-220 | VP/Eicosene Copolymer |
| | 2.50 | T-Lite SF | Titanium Dioxide, Alumina Hydrate, |
| | | | Dimethicone/Methicone Copolymer |
| C | 5.00 | Glycerin 87% | Glycerin |
| | 2.00 | Lanette E | Sodium Cetearyl Sulfate |
| | 0.30 | Keltrol | Xanthan Gum |
| | 1.00 | Pationic 138 C | Sodium Lauroyl Lactylate |
| | 1.00 | Pationic SSL | Sodium Stearoyl Lactylate |
| | 41.00 | Water demin. | Aqua dem. |
| D | 5.00 | Eusolex 232 | Phenylbenzimidazole Sulfonic Acid |
| | 2% | Fusion protein-KBD | |
| | 10.00 | Water demin. | Aqua dem. |
| E | 0.70 | Sodium hydroxide | Sodium Hydroxide |
| | q.s. | Preservative | |

| | | | |
|---|---|---|---|
| A | 5.00 | Cosmacol EMI | Di-C12-13 Alkyl Malate |
| | 4.50 | Uvinul MC 80 | Ethylhexyl Methoxycinnamate |
| | 3.00 | Uvinul N 539 T | Octocrylene |
| | 2.00 | Uvinul A Plus | Diethylamino Hydrobenzoyl Hexyl |
| | | | Benzoate |
| B | 4.00 | Tego Care 450 | Polyglyceryl-3 Methyl Glucose |
| | | | Distearate |
| | 5.00 | Isohexadecane | Isohexadecane |
| | 3.50 | Cetiol SN | Cetearyl Isononanoate |
| | 0.50 | Vitamin E acetate | Tocopheryl Acetate |
| | 1.00 | Ganex V-220 | VP/Eicosene Copolymer |
| | 2.50 | Z-COTE MAX | Zinc Oxide (And) Diphenyl Capryl |
| | | | Methicone |
| C | 5.00 | Glycerin 87% | Glycerin |
| | 2.00 | Lanette E | Sodium Cetearyl Sulfate |
| | 0.30 | Keltrol | Xanthan Gum |
| | 1.00 | Pationic 138 C | Sodium Lauroyl Lactylate |
| | 1.00 | Pationic SSL | Sodium Stearoyl Lactylate |
| | 42.50 | Water demin. | Aqua dem. |
| D | 5.00 | Eusolex 232 | Phenylbenzimidazole Sulfonic Acid |
| | 0.5% | Fusion protein-KBD | |
| | 10.00 | Water demin. | Aqua dem. |
| E | 0.70 | Sodium hydroxide | Sodium Hydroxide |
| | q.s. | Preservative | |

| | | | |
|---|---|---|---|
| A | 5.00 | Cosmacol EMI | Di-C12-13 Alkyl Malate |
| | 7.50 | Uvinul N 539 T | Octocrylene |
| | 2.00 | Mexoryl XL | Drometrizole Trisiloxane |
| B | 4.00 | Tego Care 450 | Polyglyceryl-3 Methyl Glucose |
| | | | Distearate |
| | 5.00 | Isohexadecane | Isohexadecane |
| | 3.50 | Cetiol SN | Cetearyl Isononanoate |
| | 0.50 | Vitamin E acetate | Tocopheryl Acetate |
| | 1.00 | Ganex V-220 | VP/Eicosene Copolymer |
| | 5.00 | Z-COTE MAX | Zinc Oxide (And) Diphenyl Capryl |
| | | | Methicone |
| C | 5.00 | Glycerin 87% | Glycerin |
| | 2.00 | Lanette E | Sodium Cetearyl Sulfate |
| | 0.30 | Keltrol | Xanthan Gum |
| | 1.00 | Pationic 138 C | Sodium Lauroyl Lactylate |
| | 1.00 | Pationic SSL | Sodium Stearoyl Lactylate |
| | 40.50 | Water demin. | Aqua dem. |
| D | 5.00 | Eusolex 232 | Phenylbenzimidazole Sulfonic Acid |
| | 1% | Fusion protein-KBD | |
| | 10.00 | Water demin. | Aqua dem. |
| E | 0.70 | Sodium hydroxide | Sodium Hydroxide |
| | q.s. | Preservative | |

| | | | |
|---|---|---|---|
| A | 5.00 | Cosmacol EMI | Di-C12-13 Alkyl Malate |
| | 5.50 | Uvinul N 539 T | Octocrylene |
| | 2.00 | Uvinul A Plus | Diethylamino Hydrobenzoyl Hexyl |
| | | | Benzoate |
| | 2.00 | Mexoryl XL | Drometrizole Trisiloxane |
| B | 4.00 | Tego Care 450 | Polyglyceryl-3 Methyl Glucose |
| | | | Distearate |
| | 5.00 | Isohexadecane | Isohexadecane |
| | 3.50 | Cetiol SN | Cetearyl Isononanoate |
| | 0.50 | Vitamin E acetate | Tocopheryl Acetate |
| | 1.00 | Ganex V-220 | VP/Eicosene Copolymer |
| | 5.00 | Z-COTE MAX | Zinc Oxide (And) Diphenyl Capryl |
| | | | Methicone |
| C | 5.00 | Glycerin 87% | Glycerin |
| | 2.00 | Lanette E | Sodium Cetearyl Sulfate |
| | 0.30 | Keltrol | Xanthan Gum |
| | 1.00 | Pationic 138 C | Sodium Lauroyl Lactylate |
| | 1.00 | Pationic SSL | Sodium Stearoyl Lactylate |
| | 41.50 | Water demin. | Aqua dem. |
| D | 5.00 | Eusolex 232 | Phenylbenzimidazole Sulfonic Acid |
| | 0.5% | Fusion protein-KBD | |
| | 9.50 | Water demin. | Aqua dem. |
| E | 0.70 | Sodium hydroxide | Sodium Hydroxide |
| | q.s. | Preservative | |

| | | | |
|---|---|---|---|
| A | 5.00 | Cosmacol EMI | Di-C12-13 Alkyl Malate |
| | 5.50 | Uvinul N 539 T | Octocrylene |
| | 2.00 | Uvinul A Plus | Diethylamino Hydrobenzoyl Hexyl |
| | | | Benzoate |
| | 2.00 | Mexoryl XL | Drometrizole Trisiloxane |
| B | 4.00 | Tego Care 450 | Polyglyceryl-3 Methyl Glucose |
| | | | Distearate |
| | 5.00 | Isohexadecane | Isohexadecane |
| | 3.50 | Cetiol SN | Cetearyl Isononanoate |
| | 0.50 | Vitamin E acetate | Tocopheryl Acetate |
| | 1.00 | Ganex V-220 | VP/Eicosene Copolymer |
| | 5.00 | T-Lite SF-S | Titanium Dioxide, Silica Hydrate, |
| | | | Alumina Hydrate, |
| | | | Methicone/Dimethicone Copolymer |
| C | 5.00 | Glycerin 87% | Glycerin |
| | 2.00 | Lanette E | Sodium Cetearyl Sulfate |
| | 0.30 | Keltrol | Xanthan Gum |
| | 1.00 | Pationic 138 C | Sodium Lauroyl Lactylate |
| | 1.00 | Pationic SSL | Sodium Stearoyl Lactylate |
| | 40.50 | Water demin. | Aqua dem. |
| D | 5.00 | Eusolex 232 | Phenylbenzimidazole Sulfonic Acid |
| | 1% | Fusion protein-KBD | |
| | 10.00 | Water demin. | Aqua dem. |
| E | 0.70 | Sodium hydroxide | Sodium Hydroxide |
| | q.s. | Preservative | |

| | | | |
|---|---|---|---|
| A | 8.00 | Cetiol B | Dibutyl Adipate |
| | 8.00 | Finsolv TN | C12-15 Alkyl Benzoate |
| | 10.00 | Myritol 331 | Cocoglycerides |
| | 1.00 | Lanette E | Sodium Cetearyl Sulfate |
| | 4.00 | Eumulgin VL 75 | Lauryl Glucoside, Polyglyceryl-2 |
| | | | Dipolyhydroxystearate, Glycerin |
| | 2.00 | Lanette O | Cetearyl Alcohol |
| | 1.00 | Tinosorb S | Bis-Ethylhexyloxyphenol |
| | | | Methoxyphenyl Triazine |
| | 1.00 | Uvinul T 150 | Ethylhexyl Triazone |
| | 1.00 | Vitamin E acetate | Tocopheryl Acetate |
| B | 5.00 | T-Lite SF | Titanium Dioxide, Alumina Hydrate, |
| | | | Dimethicone/Methicone Copolymer |
| C | 3.00 | Glycerin 87% | Glycerin |
| | 0.05 | Edeta BD | Disodium EDTA |
| | 0.20 | Allantoin | Allantoin |
| | 0.30 | Keltrol | Xanthan Gum |
| | 2% | Fusion protein-KBD | |
| | 1.50 | Veegum Ultra | Magnesium Aluminum Silicate |
| | ad 100 | Water demin. | Aqua dem. |
| D | q.s. | Perfume oil | |
| | q.s. | Preservative | |

| | | | |
|---|---|---|---|
| A | 8.00 | Cetiol B | Dibutyl Adipate |
| | 8.00 | Finsolv TN | C12-15 Alkyl Benzoate |
| | 10.00 | Myritol 331 | Cocoglycerides |
| | 1.00 | Lanette E | Sodium Cetearyl Sulfate |
| | 4.00 | Eumulgin VL 75 | Lauryl Glucoside, Polyglyceryl-2 |
| | | | Dipolyhydroxystearate, Glycerin |
| | 2.00 | Lanette O | Cetearyl Alcohol |
| | 1.00 | Tinosorb S | Bis-Ethylhexyloxyphenol |
| | | | Methoxyphenyl triazine |
| | 1.00 | Uvinul T 150 | Ethylhexyl Triazone |
| | 1.00 | Vitamin E acetate | Tocopheryl Acetate |
| B | 5.00 | Z-COTE MAX | Zinc Oxide (and) Diphenyl Capryl |
| | | | Methicone |
| C | 3.00 | Glycerin 87% | Glycerin |
| | 0.05 | Edeta BD | Disodium EDTA |
| | 0.20 | Allantoin | Allantoin |
| | 0.30 | Keltrol | Xanthan Gum |
| | 1% | Fusion protein-KBD | |
| | 1.50 | Veegum Ultra | Magnesium Aluminum Silicate |
| | ad 100 | Water demin. | Aqua dem. |
| D | q.s. | Perfume oil | |
| | q.s. | Preservative | |

| | | | |
|---|---|---|---|
| A | 3.00 | Glycerin 87% | Glycerin |
| | 0.20 | Edeta BD | Disodium EDTA |
| | 0.30 | Abiol | Imidazolidinyl Urea |
| | 1.00 | Plantacare 2000 | Decyl Glucoside |
| | 0.30 | Keltrol T | Xanthan Gum |
| | 57.00 | Water demin. | Aqua dem. |
| B | 5.00 | T-Lite SF-S | Titanium Dioxide, Silica Hydrate, |
| | | | Alumina Hydrate, |
| | | | Methicone/Dimethicone Copolymer |
| C | 7.50 | Uvinul MC 80 | Ethylhexyl Methoxycinnamate |
| | 2.00 | Uvinul A Plus | Diethylamino Hydroxybenzoyl |
| | | | Hexyl Benzoate |
| | 2.00 | Dow Corning 345 | Cyclopentasiloxane, |
| | | Fluid | Cyclohexasiloxane |
| | 3.50 | Cremophor A 6 | Ceteareth-6, Stearyl Alcohol |
| | 1.50 | Cremophor A 25 | Ceteareth-25 |
| | 0.50 | Beeswax 3044 PH | Beeswax |
| | 3.00 | Lanette O | Cetearyl Alcohol |
| | 10.00 | Miglyol 812 | Caprylic/Capric Triglyceride |
| D | 1.00 | Vitamin E acetate | Tocopheryl Acetate |
| | 2% | Fusion protein-KBD | |
| | 0.20 | Bisabolol rac. | Bisabolol |

| | | | |
|---|---|---|---|
| A | 3.00 | Glycerin 87% | Glycerin |
| | 0.20 | Edeta BD | Disodium EDTA |
| | 0.30 | Abiol | Imidazolidinyl Urea |
| | 1.00 | Plantacare 2000 | Decyl Glucoside |
| | 0.30 | Keltrol T | Xanthan Gum |
| | 58.00 | Water demin. | Aqua dem. |
| B | 5.00 | Z-COTE MAX | Zinc Oxide (and) Diphenyl |
| | | | Capryl Methicone |
| C | 7.50 | Uvinul MC 80 | Ethylhexyl Methoxycinnamate |
| | 2.00 | Uvinul A Plus | Diethylamino Hydroxybenzoyl |
| | | | Hexyl Benzoate |
| | 2.00 | Dow Corning 345 Fluid | Cyclopentasiloxane, |
| | | | Cyclohexasiloxane |
| | 3.50 | Cremophor A 6 | Ceteareth-6, Stearyl Alcohol |
| | 1.50 | Cremophor A 25 | Ceteareth-25 |
| | 0.50 | Beeswax 3044 PH | Beeswax |
| | 3.00 | Lanette O | Cetearyl Alcohol |
| | 10.00 | Miglyol 812 | Caprylic/Capric Triglyceride |
| D | 1.00 | Vitamin E acetate | Tocopheryl Acetate |
| | 1% | Fusion protein-KBD | |
| | 0.20 | Bisabolol rac. | Bisabolol |

| | | | |
|---|---|---|---|
| A | 3.00 | Glycerin 87% | Glycerin |
| | 0.20 | Edeta BD | Disodium EDTA |
| | 0.30 | Abiol | Imidazolidinyl Urea |
| | 1.00 | Plantacare 2000 | Decyl Glucoside |
| | 0.30 | Keltrol T | Xanthan Gum |
| | 58.50 | Water demin. | Aqua dem. |
| B | 5.00 | T-Lite SF-S | Titanium Dioxide, Silica Hydrate, |
| | | | Alumina Hydrate, |
| | | | Methicone/Dimethicone Copolymer |
| C | 7.50 | Uvinul MC 80 | Ethylhexyl Methoxycinnamate |
| | 5.00 | Uvinul N 539 T | Octocrylene |
| | 2.00 | Parsol 1789 | Butyl Methoxydibenzoylmethane |
| | 2.00 | Dow Corning 345 | Cyclopentasiloxane, |
| | | Fluid | Cyclohexasiloxane |
| | 3.50 | Cremophor A 6 | Ceteareth-6, Stearyl Alcohol |
| | 1.50 | Cremophor A 25 | Ceteareth-25 |
| | 0.50 | Beeswax 3044 PH | Beeswax |
| | 3.00 | Lanette O | Cetearyl Alcohol |
| | 10.00 | Miglyol 812 | Caprylic/Capric Triglyceride |
| D | 1.00 | Vitamin E acetate | Tocopheryl Acetate |
| | 0.5% | Fusion protein-KBD | |
| | 0.20 | Bisabolol rac. | Bisabolol |

| | | | |
|---|---|---|---|
| A | 3.00 | Glycerin 87% | Glycerin |
| | 0.20 | Edeta BD | Disodium EDTA |
| | 0.30 | Abiol | Imidazolidinyl Urea |
| | 1.00 | Plantacare 2000 | Decyl Glucoside |
| | 0.30 | Keltrol T | Xanthan Gum |
| | 2.00 | Mexoryl SL | Terephthalidene Dicamphor |
| | | | Sulfonic Acid |
| | 58.40 | Water demin. | Aqua dem. |
| B | 6.00 | T-Lite SF-S | Titanium Dioxide, Silica Hydrate, |
| | | | Alumina Hydrate, |
| | | | Methicone/Dimethicone Copolymer |
| | 6.00 | Uvinul N 539 T | Octocrylene |
| | 2.00 | Parsol 1789 | Butyl Methoxydibenzoylmethane |
| | 2.00 | Dow Corning 345 | Cyclopentasiloxane, |
| | | Fluid | Cyclohexasiloxane |
| | 3.50 | Cremophor A 6 | Ceteareth-6, Stearyl Alcohol |
| | 1.50 | Cremophor A 25 | Ceteareth-25 |
| | 0.50 | Beeswax 3044 PH | Beeswax |
| | 3.00 | Lanette O | Cetearyl Alcohol |
| | 10.00 | Miglyol 812 | Caprylic/Capric Triglyceride |
| D | 1.00 | Vitamin E acetate | Tocopheryl Acetate |
| | 0.1% | Fusion protein-KBD | |
| | 0.20 | Bisabolol rac. | Bisabolol |

| | | | |
|---|---|---|---|
| A | 3.00 | Glycerin 87% | Glycerin |
| | 0.20 | Edeta BD | Disodium EDTA |
| | 0.30 | Abiol | Imidazolidinyl Urea |
| | 1.00 | Plantacare 2000 | Decyl Glucoside |
| | 0.30 | Keltrol T | Xanthan Gum |
| | 2.00 | Mexoryl SL | Terephthalidene Dicamphor |
| | | | Sulfonic Acid |
| | 58.45 | Water demin. | Aqua dem. |
| B | 6.00 | Z-COTE MAX | Zinc Oxide (and) Diphenyl Capryl |
| | | | Methicone |
| | 6.00 | Uvinul N 539 T | Octocrylene |
| | 2.00 | Parsol 1789 | Butyl Methoxydibenzoylmethane |
| | 2.00 | Dow Corning 345 | Cyclopentasiloxane, |
| | | Fluid | Cyclohexasiloxane |
| | 3.50 | Cremophor A 6 | Ceteareth-6, Stearyl Alcohol |
| | 1.50 | Cremophor A 25 | Ceteareth-25 |
| | 0.50 | Beeswax 3044 PH | Beeswax |
| | 3.00 | Lanette O | Cetearyl Alcohol |
| | 10.00 | Miglyol 812 | Caprylic/Capric Triglyceride |
| D | 1.00 | Vitamin E acetate | Tocopheryl Acetate |
| | 0.05% | Fusion protein-KBD | |
| | 0.20 | Bisabolol rac. | Bisabolol |

| | | | |
|---|---|---|---|
| A | 3.00 | Glycerin 87% | Glycerin |
| | 0.20 | Edeta BD | Disodium EDTA |
| | 0.30 | Abiol | Imidazolidinyl Urea |
| | 1.00 | Plantacare 2000 | Decyl Glucoside |
| | 0.30 | Keltrol T | Xanthan Gum |
| | 2.00 | Neoheliopan AP | Disodium Phenyl Dibenzimidazole |
| | | | Tetrasulfonate |
| | 57.50 | Water demin. | Aqua dem. |
| B | 6.00 | Z-COTE MAX | Zinc Oxide (and) Dipheny Capryl |
| | | | Methicone |
| | 6.00 | Uvinul N 539 T | Octocrylene |
| | 2.00 | Parsol 1789 | Butyl Methoxydibenzoylmethane |
| | 2.00 | Dow Corning 345 | Cyclopentasiloxane, |
| | | Fluid | Cyclohexasiloxane |
| | 3.50 | Cremophor A 6 | Ceteareth-6, Stearyl Alcohol |
| | 1.50 | Cremophor A 25 | Ceteareth-25 |
| | 0.50 | Beeswax 3044 PH | Beeswax |
| | 3.00 | Lanette O | Cetearyl Alcohol |
| | 10.00 | Miglyol 812 | Caprylic/Capric Triglyceride |
| D | 1.00 | Vitamin E acetate | Tocopheryl Acetate |
| | 1.0% | Fusion protein-KBD | |
| | 0.20 | Bisabolol rac. | Bisabolol |

| | | | |
|---|---|---|---|
| A | 25.00 | Dow Corning 345 | Cyclopentasiloxane, |
| | | Fluid | Cyclohexasiloxane |
| | 20.00 | Dow Corning 245 | Cyclopentasiloxane |
| | | Fluid | |
| | 8.00 | Uvinul MC 80 | Ethylhexyl Methoxycinnamate |
| | 4.00 | Abil EM 90 | Cetyl PEG/PPG-10/1 Dimethicone |
| | 7.00 | T-Lite SF | Titanium Dioxide, Alumina Hydrate, |
| | | | Dimethicone/Methicone Copolymer |
| B | 17.00 | Ethanol 95% | Alcohol |
| | 10.00 | Z-COTE MAX | Zinc Oxide (and) Diphenyl Capryl |
| | | | Methicone |
| | 4.50 | Water demin. | Aqua dem. |
| | 3.00 | Glycerin 87% | Glycerin |
| | 0.5% | Fusion protein-KBD | |
| | 1.00 | talc | Talc |

| | | | |
|---|---|---|---|
| A | 25.00 | Dow Corning 345 | Cyclopentasiloxane, |
| | | Fluid | Cyclohexasiloxane |
| | 20.00 | Dow Corning 245 | Cyclopentasiloxane |
| | | Fluid | |
| | 8.00 | Uvinul MC 80 | Ethylhexyl Methoxycinnamate |
| | 4.00 | Abil EM 90 | Cetyl PEG/PPG-10/1 Dimethicone |
| | 7.00 | T-Lite SF-S | Titanium Dioxide, Silica Hydrate, |
| | | | Alumina Hydrate, |
| | | | Methicone/Dimethicone Copolymer |
| B | 17.00 | Ethanol 95% | Alcohol |
| | 9.99 | Z-COTE MAX | Zinc Oxide (and) Diphenyl Capryl |
| | | | Methicone |
| | 5.00 | Water demin. | Aqua dem. |
| | 3.00 | Glycerin 87% | Glycerin |
| | 0.01% | Fusion protein-KBD | |
| | 1.00 | talc | Talc |

| | | | |
|---|---|---|---|
| A | 20.00 | Dow Corning 345 | Cyclopentasiloxane, |
| | | Fluid | Cyclohexasiloxane |
| | 10.00 | Dow Corning 245 | Cyclopentasiloxane |
| | | Fluid | |
| | 7.50 | Uvinul MC 80 | Ethylhexyl Methoxycinnamate |
| | 2.00 | Uvinul T 150 | Ethylhexyl Triazone |
| | 12.00 | Cosmacol EMI | Di-C12-13 Alkyl Malate |
| | 4.00 | Abil EM 90 | Cetyl PEG/PPG-10/1 Dimethicone |
| B | 7.00 | T-Lite SF | Titanium Dioxide, Alumina Hydrate, |
| | | | Dimethicone/Methicone Copolymer |
| C | 15.00 | Ethanol 95% | Alcohol |
| | 10.00 | Z-COTE MAX | Zinc Oxide (and) Diphenyl Capryl |
| | | | Methicone |
| | 3.00 | Glycerin 87% | Glycerin |
| | 1.5% | Fusion protein-KBD | |
| | 8.00 | Water demin. | Aqua dem. |

| | | | |
|---|---|---|---|
| A | 20.00 | Dow Corning 345 | Cyclopentasiloxane, |
| | | Fluid | Cyclohexasiloxane |
| | 10.00 | Dow Corning 245 | Cyclopentasiloxane |
| | | Fluid | |
| | 7.50 | Uvinul MC 80 | Ethylhexyl Methoxycinnamate |
| | 2.00 | Tinosorb S | Bis-Ethylhexyloxyphenol |
| | | | Methoxyphenyl Triazine |
| | 12.00 | Cosmacol EMI | Di-C12-13 Alkyl Malate |
| | 4.00 | Abil EM 90 | Cetyl PEG/PPG-10/1 Dimethicone |
| B | 7.00 | T-Lite SF | Titanium Dioxide, Alumina Hydrate, |
| | | | Dimethicone/Methicone Copolymer |
| C | 15.00 | Ethanol 95% | Alcohol |
| | 10.00 | Z-COTE MAX | Zinc Oxide (and) Diphenyl Capryl |
| | | | Methicone |
| | 3.00 | Glycerin 87% | Glycerin |
| | 0.5% | Fusion protein-KBD | |
| | 9.00 | Water demin. | Aqua dem. |

| | | | |
|---|---|---|---|
| A | 2.00 | Cremophor WO 7 | PEG-7 Hydrogenated Castor Oil |
| | 6.00 | Abil B 8839 | Cyclopentasiloxane, |
| | | | Cyclohexasiloxane |
| | 3.00 | T-Lite SF | Titanium Dioxide, Alumina Hydrate, |
| | | | Dimethicone/Methicone Copolymer |
| | 4.00 | Isopropyl Palmitate | Isopropyl Palmitate |
| | 1.00 | Abil 350 | Dimethicone |
| B | 7.00 | Uvinul MC 80 | Ethylhexyl Methoxycinnamate |
| | 1.00 | Uvinul T 150 | Ethylhexyl Triazone |
| | 7.00 | Finsolv TN | C12-15 Alkyl Benzoate |
| | 4.00 | Abil WE 09 | Polyglyceryl-4 Isostearate, Cetyl |
| | | | PEG/PPG-10/1 Dimethicone, Hexyl |
| | | | Laurate |
| C | 0.50 | Sodium chloride | Sodium Chloride |
| | 0.20 | Edeta BD | Disodium EDTA |
| | 61.30 | Water demin. | Aqua dem. |
| D | 1.00 | Vitamin E acetate | Tocopheryl Acetate |
| | 1% | Fusion protein-KBD | |
| | q.s. | Preservative | |

| | | | |
|---|---|---|---|
| A | 2.00 | Cremophor WO 7 | PEG-7 Hydrogenated Castor Oil |
| | 6.00 | Abil B 8839 | Cyclopentasiloxane, |
| | | | Cyclohexasiloxane |
| | 3.00 | Z-COTE MAX | Zinc Oxide (and) Diphenyl Capryl |
| | | | Methicone |
| | 4.00 | Isopropyl Palmitate | Isopropyl Palmitate |
| | 1.00 | Abil 350 | Dimethicone |
| B | 7.00 | Uvinul MC 80 | Ethylhexyl Methoxycinnamate |
| | 1.00 | Uvinul T 150 | Ethylhexyl Triazone |
| | 7.00 | Finsolv TN | C12-15 Alkyl Benzoate |
| | 4.00 | Abil WE 09 | Polyglyceryl-4 Isostearate, Cetyl |
| | | | PEG/PPG-10/1 Dimethicone, Hexyl |
| | | | Laurate |
| C | 0.50 | Sodium chloride | Sodium Chloride |
| | 0.20 | Edeta BD | Disodium EDTA |
| | 62.20 | Water demin. | Aqua dem. |
| D | 1.00 | Vitamin E acetate | Tocopheryl Acetate |
| | 0.1% | Fusion protein-KBD | |
| | q.s. | Preservative | |

| | | | |
|---|---|---|---|
| A | 2.00 | Cremophor WO 7 | PEG-7 Hydrogenated Castor Oil |
| | 6.00 | Abil B 8839 | Cyclopentasiloxane, |
| | | | Cyclohexasiloxane |
| | 3.00 | Z-COTE MAX | Zinc Oxide (and) Diphenyl Capryl |
| | | | Methicone |
| | 4.00 | Isopropyl Palmitate | Isopropyl Palmitate |
| | 1.00 | Abil 350 | Dimethicone |
| B | 7.00 | Uvinul MC 80 | Ethylhexyl Methoxycinnamate |
| | 1.00 | Tinosorb S | Bis-Ethylhexyloxyphenol |
| | | | Methoxyphenyl Triazine |
| | 7.00 | Finsolv TN | C12-15 Alkyl Benzoate |
| | 4.00 | Abil WE 09 | Polyglyceryl-4 Isostearate, Cetyl |
| | | | PEG/PPG-10/1 Dimethicone, Hexyl |
| | | | Laurate |
| C | 0.50 | Sodium chloride | Sodium Chloride |
| | 0.20 | Edeta BD | Disodium EDTA |
| | 60.30 | Water demin. | Aqua dem. |
| D | 1.00 | Vitamin E acetate | Tocopheryl Acetate |
| | 2% | Fusion protein-KBD | |
| | q.s. | Preservative | |

| | | | |
|---|---|---|---|
| A | 2.00 | Cremophor WO 7 | PEG-7 Hydrogenated Castor Oil |
| | 6.00 | Abil B 8839 | Cyclopentasiloxane, |
| | | | Cyclohexasiloxane |
| | 6.00 | Z-COTE MAX | Zinc Oxide (and) Diphenyl Capryl |
| | | | Methicone |
| | 4.00 | Isopropyl Palmitate | Isopropyl Palmitate |
| | 1.00 | Abil 350 | Dimethicone |
| B | 4.00 | Uvinul N 539 T | Octocrylene |
| | 1.00 | Tinosorb S | Bis-Ethylhexyloxyphenol |
| | | | Methoxyphenyl Triazine |
| | 7.00 | Finsolv TN | C12-15 Alkyl Benzoate |
| | 4.00 | Abil WE 09 | Polyglyceryl-4 Isostearate, Cetyl |
| | | | PEG/PPG-10/1 Dimethicone, Hexyl |
| | | | Laurate |
| C | 0.50 | Sodium chloride | Sodium Chloride |
| | 0.20 | Edeta BD | Disodium EDTA |
| | 62.10 | Water demin. | Aqua dem. |
| D | 1.00 | Vitamin E acetate | Tocopheryl Acetate |
| | 0.2% | Fusion protein-KBD | |
| | q.s. | Preservative | |

| | | | |
|---|---|---|---|
| A | 2.00 | Cremophor WO 7 | PEG-7 Hydrogenated Castor Oil |
| | 6.00 | Abil B 8839 | Cyclopentasiloxane, |
| | | | Cyclohexasiloxane |
| | 6.00 | Z-COTE MAX | Zinc Oxide (and) Diphenyl Capryl |
| | | | Methicone |
| | 4.00 | Isopropyl Palmitate | Isopropyl Palmitate |
| | 1.00 | Abil 350 | Dimethicone |
| B | 3.00 | Uvinul N 639 T | Octocrylene |
| | 1.00 | Mexoryl XL | Drometrizole Trisiloxane |
| | 1.00 | Tinosorb S | Bis-Ethylhexyloxyphenol |
| | | | Methoxyphenyl Triazine |
| | 7.00 | Finsolv TN | C12-15 Alkyl Benzoate |
| | 4.00 | Abil WE 09 | Polyglyceryl-4 Isostearate, Cetyl |
| | | | PEG/PPG-10/1 Dimethicone, Hexyl |
| | | | Laurate |
| C | 0.50 | Sodium chloride | Sodium Chloride |
| | 0.20 | Edeta BD | Disodium EDTA |
| | 1% | Fusion protein-KBD | |
| | 61.30 | Water demin. | Aqua dem. |
| D | 1.00 | Vitamin E acetate | Tocopheryl Acetate |
| | q.s. | Preservative | |

| | | | |
|---|---|---|---|
| A | 2.00 | Cremophor WO 7 | PEG-7 Hydrogenated Castor Oil |
| | 6.00 | Abil B 8839 | Cyclopentasiloxane, |
| | | | Cyclohexasiloxane |
| | 6.00 | T-Lite SF-S | Titanium Dioxide, Silica Hydrate, |
| | | | Alumina Hydrate, |
| | | | Methicone/Dimethicone Copolymer |
| | 4.00 | Isopropyl Palmitate | Isopropyl Palmitate |
| | 1.00 | Abil 350 | Dimethicone |
| B | 3.00 | Uvinul N 539 T | Octocrylene |
| | 1.00 | Mexoryl XL | Drometrizole trisiloxane |
| | 1.00 | Tinosorb S | Bis-Ethylhexyloxyphenol |
| | | | Methoxyphenyl Triazine |
| | 7.00 | Finsolv TN | C12-15 Alkyl Benzoate |
| | 4.00 | Abil WE 09 | Polyglyceryl-4 Isostearate, Cetyl |
| | | | PEG/PPG-10/1 Dimethicone, Hexyl |
| | | | Laurate |
| C | 0.50 | Sodium chloride | Sodium Chloride |
| | 0.20 | Edeta BD | Disodium EDTA |
| | 61.80 | Water demin. | Aqua dem. |
| D | 1.00 | Vitamin E acetate | Tocopheryl Acetate |
| | 0.5% | Fusion protein-KBD | |
| | q.s. | Preservative | |

| | | | |
|---|---|---|---|
| A | 4.50 | Uvinul MC 80 | Ethylhexyl Methoxycinnamate |
| | 3.00 | Uvinul N 539 T | Octocrylene |
| | 1.00 | Uvinul T 150 | Ethylhexyl Triazone |
| | 2.50 | Cosmacol EMI | Di-C12-13 Alkyl Malate |
| B | 0.50 | Vitamin E acetate | Tocopheryl Acetate |
| | 4.00 | Tego Care 450 | Polyglyceryl-3 Methyl Glucose |
| | | | Distearate |
| C | 3.50 | Cetiol SN | Cetearyl Isononanoate |
| | 1.00 | Ganex V-220 | VP/Eicosene Copolymer |
| | 5.00 | Isohexadecane | Isohexadecane |
| | 2.50 | Cosmacol EMI | Di-C12-13 Alkyl Malate |
| | 5.00 | Z-COTE MAX | Zinc Oxide (and) Diphenyl Capryl |
| | | | Methicone |
| D | 44.00 | Water demin. | Aqua dem. |
| | 5.00 | Glycerin 87% | Glycerin |
| | 1.00 | Lanette E | Sodium Cetearyl Sulfate |
| | 15.00 | Luviquat Care | Polyquaternium-44 |
| | 1% | Fusion protein-KBD | |
| | 0.50 | Keltrol | Xanthan Gum |
| E | 1.00 | Phenonip | |

| | | | |
|---|---|---|---|
| A | 4.50 | Uvinul MC 80 | Ethylhexyl Methoxycinnamate |
| | 3.00 | Uvinul N 539 T | Octocrylene |
| | 1.00 | Tinosorb S | Bis-Ethoxylhexyloxyphenol |
| | | | Methoxyphenyl Triazine |
| | 2.50 | Cosmacol EMI | Di-C12-13 Alkyl Malate |
| B | 0.50 | Vitamin E acetate | Tocopheryl Acetate |
| | 4.00 | Tego Care 450 | Polyglyceryl-3 Methyl Glucose |
| | | | Distearate |
| C | 3.50 | Cetiol SN | Cetearyl Isononanoate |
| | 1.00 | Ganex V-220 | VP/Eicosene Copolymer |
| | 5.00 | Isohexedecane | Isohexadecane |
| | 2.50 | Cosmacol EMI | Di-C12-13 Alkyl Malate |
| | 5.00 | Z-COTE MAX | Zinc Oxide (and) Diphenyl Capryl |
| | | | Methicone |
| D | 44.90 | Water demin. | Aqua dem. |
| | 5.00 | Glycerin 87% | Glycerin |
| | 1.00 | Lanette E | Sodium Cetearyl Sulfate |
| | 15.00 | Luviquat Care | Polyquaternium-44 |
| | 0.1% | Fusion protein-KBD | |
| | 0.50 | Keltrol | Xanthan Gum |
| E | 1.00 | Phenonip | |

| | | | |
|---|---|---|---|
| A | 1.50 | Mexoryl XL | Drometrizole Trisiloxane |
| | 5.00 | Uvinul N 539 T | Octocrylene |
| | 1.00 | Tinosorb S | Bis-Ethylhexyloxyphenol |
| | | | Methoxyphenyl Triazine |
| | 2.50 | Cosmacol EMI | Di-C12-13 Alkyl Malate |
| B | 0.50 | Vitamin E acetate | Tocopheryl Acetate |
| | 4.00 | Tego Care 450 | Polyglyceryl-3 Methyl Glucose |
| | | | Distearate |
| C | 3.50 | Cetiol SN | Cetearyl Isononanoate |
| | 1.00 | Ganex V-220 | VP/Eicosene Copolymer |
| | 5.00 | Isohexadecane | Isohexadecane |
| | 2.50 | Cosmacol EMI | Di-C12-13 Alkyl Malate |
| | 5.00 | Z-COTE MAX | Zinc Oxide (and) Diphenyl Capryl |
| | | | Methicone |
| D | 44.50 | Water demin. | Aqua dem. |
| | 5.00 | Glycerin 87% | Glycerin |
| | 1.00 | Lanette E | Sodium Cetearyl Sulfate |
| | 15.00 | Luviquat Care | Polyquaternium-44 |
| | 1.5% | Fusion protein-KBD | |
| | 0.50 | Keltrol | Xanthan Gum |
| E | 1.00 | Phenonip | |

| | | | |
|---|---|---|---|
| A | 1.50 | Mexoryl XL | Drometrizole Trisiloxane |
| | 5.00 | Uvinul N 539 T | Octocrylene |
| | 1.00 | Tinosorb S | Bis-Ethylhexyloxyphenol |
| | | | Methoxyphenyl Triazine |
| | 2.50 | Cosmacol EMI | Di-C12-13 Alkyl Malate |
| B | 0.50 | Vitamin E acetate | Tocopheryl Acetate |
| | 4.00 | Tego Care 450 | Polyglyceryl-3 Methyl Glucose |
| | | | Distearate |
| C | 3.50 | Cetiol SN | Cetearyl Isononanoate |
| | 1.00 | Ganex V-220 | VP/Eicosene Copolymer |
| | 5.00 | Isohexadecane | Isohexadecane |
| | 2.50 | Cosmacol EMI | Di-C12-13 Alkyl Malate |
| | 5.00 | T-Lite SF | Titanium Dioxide, Alumina Hydrate, |
| | | | Dimethicone/Methicone Copolymer |
| D | 45.00 | Water demin. | Aqua dem. |
| | 5.00 | Glycerin 87% | Glycerin |
| | 1.00 | Lanette E | Sodium Cetearyl Sulfate |
| | 15.00 | Luviquat Care | Polyquaternium-44 |
| | 1% | Fusion protein-KBD | |
| | 0.50 | Keltrol | Xanthan Gum |
| E | 1.00 | Phenonip | |

| | | | |
|---|---|---|---|
| A | 1.00 | Abil Care 85 | Bis-PEG/PPG-16/16 PEG/PPG-16/16 |
| | | | Dimethicone, Caprylic/Capric Triglyceride |
| | 3.00 | Cremophor CO 40 | PEG-40 Hydrogenated Castor Oil |
| | 0.30 | Cremophor WO 7 | PEG-7 Hydrogenated Castor Oil |
| | 5.00 | Uvinul MC 80 | Ethylhexyl Methoxycinnamate |
| | 10.00 | Witconol APM | PPG-3 Myristyl Ether |
| | 2.00 | Uvinul T 150 | Ethylhexyl Triazone |
| | 1.00 | Dow Corning 345 Fluid | Cyclopentasiloxane, Cyclohexasiloxane |
| | 5.00 | Uvinul N 539 T | Octocrylene |
| B | 5.00 | Z-COTE MAX | Zinc Oxide (and) Diphenyl Capryl Methicone |
| C | 5.00 | 1,2-Propylene glycol | Propylene Glycol |
| | 0.20 | Keltrol | Xanthan Gum |
| | 0.10 | Edeta BD | Disodium EDTA |
| | 2.0% | Fusion protein-KBD | |
| | 1.50 | Simulgel 600 | Acrylamide/Sodium Acryloyldimethyltaurate |
| | | | Copolymer, Isohexadecane, Polysorbate 80 |
| | 58.40 | Water demin. | Aqua dem. |
| D | q.s. | Perfume oil | |
| | 0.50 | Glydant | DMDM Hydantoin |

| | | | |
|---|---|---|---|
| A | 2.00 | Abil Care 85 | Bis-PEG/PPG-16/16 PEG/PPG-16/16 |
| | | | Dimethicone, Caprylic/Capric |
| | | | Triglyceride |
| | 4.00 | Finsolv TN | C12-15 Alkyl Benzoate |
| | 1.50 | Miglyol 812 | Caprylic/Capric Triglyceride |
| | 0.50 | Vitamin E acetate | Tocopheryl Acetate |
| | 7.50 | Uvinul MC 80 | Ethylhexyl Methoxycinnamate |
| | 4.00 | Cetiol B | Dibutyl Adipate |
| | 3.00 | Luvitol EHO | Cetearyl Ethylhexanoate |
| | 1.00 | Cremophor CO 40 | PEG-40 Hydrogenated Castor Oil |
| | 1.00 | Paraffin oil, low | Mineral Oil |
| | | viscosity | |
| | 3.00 | Plantacare 2000 | Decyl Glucoside |
| | 0.50 | Phenonip | |
| | q.s. | Perfume oil | |
| B | 4.00 | Z-COTE MAX | Zinc Oxide (and) Diphenyl Capryl |
| | | | Methicone |
| C | 2.00 | Simulgel NS | Hydroxyethyl Acrylate/Sodium |
| | | | Acryloyldimethyl Taurate |
| | | | Copolymer, Squalane, |
| | | | Polysorbate 60 |
| | 0.20 | Keltrol | Xanthan Gum |
| | 0.10 | Edeta BD | Disodium EDTA |
| | 1% | Fusion protein-KBD | |
| | 64.20 | Water demin. | Aqua dem. |

| | | | |
|---|---|---|---|
| A | 6.00 | Gilugel SIL 5 | Cyclomethicone (and) Aluminum/ |
| | | | Magnesium Hydroxide |
| | | | Stearate |
| | 5.00 | Uvinul MC 80 | Ethylhexyl Methoxycinnamate |
| | 2.00 | Uvinul A Plus | Diethylamino Hydroxybenzoyl Hexyl |
| | | | Benzoate |
| | 1.00 | Uvinul T 150 | Ethylhexyl Triazone |
| | 7.00 | Finsolv TN | C12-15 Alkyl Benzoate |
| | 4.00 | Abil WE 09 | Polyglyceryl-4 Isostearate, Cetyl PEG/ |
| | | | PPG-10/1 Dimethicone, Hexyl Laurate |
| | 2.00 | Cosmacol EMI | Di-C12-13 Alkyl Malate |
| | 3.00 | Isopro palmitate | Isopropyl Palmitate |
| | 5.00 | Abil B 8839 | Cyclopentasiloxane, Cyclohexasiloxane |
| | 0.50 | Abil 350 | Dimethicone |
| B | 0.50 | Sodium chloride | Sodium Chloride |
| | 0.20 | Edeta BD | Disodium EDTA |
| | 0.2% | Fusion | |
| | | protein-KBD | |
| | 62.10 | Water demin. | Aqua dem. |
| C | 1.00 | Vitamin E acetate | Tocopheryl Acetate |
| | 0.50 | Phenonip | |

| | | | |
|---|---|---|---|
| A | 4.50 | Uvinul MC 80 | Ethylhexyl Methoxycinnamate |
| | 2.00 | Tinosorb S | Bis-Ethylhexyloxyphenol Methoxyphenyl |
| | | | Triazine |
| | 3.00 | Uvinul N 539 T | Octocrylene |
| | 2.50 | Cosmacol EMI | Di-C12-13 Alkyl Malate |
| | 0.50 | Vitamin E acetate | Tocopheryl Acetate |
| | 4.00 | Tego Care 450 | Polyglyceryl-3 Methyl Glucose Distearate |
| B | 3.50 | Cetiol SN | Cetearyl Isononanoate |
| | 1.00 | Ganex V-220 | VP/Eicosene Copolymer |
| | 5.00 | Isohexadecane | Isohexadecane |
| | 2.50 | Cosmacol EMI | Di-C12-13 Alkyl Malate |
| | 3.00 | T-Lite SF | Titanium Dioxide, Alumina Hydrate, |
| | | | Dimethicone/Methicone Copolymer |
| C | 5.00 | Glycerin 87% | Glycerin |
| | 1.00 | Lanette E | Sodium Cetearyl Sulfate |
| | 0.50 | Keltrol | Xanthan Gum |
| | 1% | Fusion protein-KBD | |
| | 59.70 | Water demin. | Aqua dem. |
| D | 1.00 | Phenonip | |
| | 0.30 | Bisabolol rac. | Bisabolol |

| | | | |
|---|---|---|---|
| A | 2.00 | Abil Care 85 | Bis-PEG/PPG-16/16 PEG/PPG-16/16 |
| | | | Dimethicone, Caprylic/Capric |
| | | | Triglyceride |
| | 4.00 | Finsolv TN | C12-15 Alkyl Benzoate |
| | 1.50 | Miglyol 812 | Caprylic/Capric Triglyceride |
| | 0.50 | Vitamin E acetate | Tocopheryl Acetate |
| | 7.50 | Uvinul MC 80 | Ethylhexyl Methoxycinnamate |
| | 4.00 | Cetiol B | Dibutyl Adipate |
| | 1.00 | Luvitol EHO | Cetearyl Ethylhexanoate |
| | 1.00 | Cremophor CO 40 | PEG-40 Hydrogenated Castor Oil |
| | 1.00 | Paraffin oil, | Mineral Oil |
| | | low viscosity | |
| | 3.00 | Plantacare 2000 | Decyl Glucoside |
| | 1.00 | Uvinul A Plus | Diethylamino Hydroxybenzoyl Hexyl |
| | | | Benzoate |
| | 0.50 | Phenonip | |
| | 2.50 | Uvinul T 150 | Ethylhexyl Triazone |
| | q.s. | Perfume oil | |
| B | 4.00 | Z-COTE MAX | Zinc Oxide (and) Diphenyl Capryl |
| | | | Methicone |
| C | 2.00 | Simulgel NS | Hydroxyethyl Acrylate/Sodium |
| | | | Acryloyldimethyl Taurate |
| | | | Copolymer, Squalane, Polysorbate 60 |
| | 0.10 | Keltrol | Xanthan Gum |
| | 0.10 | Edeta BD | Disodium EDTA |
| | 0.5% | Fusion protein-KBD | |
| | 59.90 | Water demin. | Aqua dem. |

| | | | |
|---|---|---|---|
| A | 4.00 | Eumulgin VL 75 | Lauryl Glucoside, Polyglyceryl-2 |
| | | | Dipolyhydroxystearate, Glycerin |
| | 2.00 | Lanette O | Cetearyl Alcohol |
| | 12.00 | Myritol 331 | Cocoglycerides |
| | 8.00 | Finsolv TN | C12-15 Alkyl Benzoate |
| | 8.00 | Cetiol B | Dibutyl Adipate |
| B | 6.00 | T-Lite SF | Titanium Dioxide, Alumina Hydrate, |
| | | | Dimethicone/Methicone Copolymer |
| | 5.00 | Z-COTE MAX | Zinc Oxide (and) Diphenyl Capryl |
| | | | Methicone |
| C | 3.00 | Glycerin 87% | Glycerin |
| | 0.10 | Edeta BD | Disodium EDTA |
| | 1.50 | Veegum Ultra | Magnesium Aluminum Silicate |
| | 1.50 | Lanette E | Sodium Cetearyl Sulfate |
| | 2% | Fusion protein-KBD | |
| | 0.30 | Keltrol | Xanthan Gum |
| | 45.10 | Water demin. | Water |
| D | 1.00 | Phenonip | Phenoxyethanol, Methylparaben, |
| | | | Ethylparaben, Butylparaben, |
| | | | Propylparaben, Isobutylparaben |

| | | | |
|---|---|---|---|
| A | 4.00 | Eumulgin VL 75 | Lauryl Glucoside, Polyglyceryl-2 |
| | | | Dipolyhydroxystearate, Glycerin |
| | 2.00 | Lanette O | Cetearyl Alcohol |
| | 12.00 | Myritol 331 | Cocoglycerides |
| | 8.00 | Finsolv TN | C12-15 Alkyl Benzoate |
| | 8.00 | Cetiol B | Dibutyl Adipate |
| B | 6.00 | Uvinul N 539 T | Octocrylene |
| | 5.00 | Z-COTE MAX | Zinc Oxide (and) Diphenyl Capryl |
| | | | Methicone |
| C | 3.00 | Glycerin 87% | Glycerin |
| | 0.10 | Edeta BD | Disodium EDTA |
| | 1.50 | Veegum Ultra | Magnesium Aluminum Silicate |
| | 1.50 | Lanette E | Sodium Cetearyl Sulfate |
| | 0.30 | Carbopol Ultrez 10 P | Carbomer |
| | 2% | Fusion protein-KBD | |
| | 46.10 | Water demin. | Aqua dem. |
| D | 1.00 | Phenonip | Phenoxyethanol, Methylparaben, |
| | | | Ethylparaben, Butylparaben, |
| | | | Propylparaben, Isobutylparaben |

| | | | |
|---|---|---|---|
| A | 4.00 | Eumulgin VL 75 | Lauryl Glucoside, Polyglyceryl-2 |
| | | | Dipolyhydroxystearate, Glycerin |
| | 2.00 | Lanette O | Cetearyl Alcohol |
| | 10.00 | Myritol 331 | Cocoglycerides |
| | 8.00 | Finsolv TN | C12-15 Alkyl Benzoate |
| | 8.00 | Cetiol B | Dibutyl Adipate |
| B | 2.00 | Uvinul A Plus | Diethylamino Hydroxybenzoyl |
| | | | Hexyl Benzoate |
| | 5.00 | Z-COTE MAX | Zinc Oxide (and) Diphenyl |
| | | | Capryl Methicone |
| C | 3.00 | Glycerin 87% | Glycerin |
| | 0.10 | Edeta BD | Disodium EDTA |
| | 1.50 | Veegum Ultra | Magnesium Aluminum Silicate |
| | 1.50 | Lanette E | Sodium Cetearyl Sulfate |
| | 5.0% | Fusion protein-KBD | |
| | 0.30 | Carbopol Ultrez 10 P | Carbomer |
| | | add Water demin. | Water |
| D | 1.00 | Phenonip | Phenoxyethanol, Methylparaben, |
| | | | Ethylparaben, Butylparaben, |
| | | | Propylparaben, Isobutylparaben |

| | | | |
|---|---|---|---|
| A | 3.50 | Cremophor A 6 | Ceteareth-6, Stearyl Alcohol |
| | 1.50 | Cremophor A 25 | Ceteareth-25 |
| | 7.50 | Uvinul MC 80 | Ethylhexyl Methoxycinnamate |
| | 2.00 | Uvinul A Plus | Diethylamino Hydroxybenzoyl |
| | | | Hexyl Benzoate |
| | 2.00 | Dow Corning 345 | Cyclopentasiloxane, |
| | | | Cyclohexasiloxane Fluid |
| | 0.50 | Beeswax 3044 PH | Beeswax |
| | 3.00 | Lanette O | Cetearyl Alcohol |
| | 10.00 | Miglyol 812 | Caprylic/Capric Triglyceride |
| B | 5.00 | T-Lite SF-S Titanium | Titanium Dioxide, Silica |
| | | | Hydrate, Alumina Hydrate, |
| | | | Methicone/Dimethicone Copolymer |
| C | 3.00 | Glycerin 87% | Glycerin |
| | 0.20 | Edeta BD | Disodium EDTA |
| | 0.30 | Keltrol T | Xanthan Gum |
| | 1.00 | Plantacare 2000 | Decyl Glucoside |
| | 1% | Fusion protein-KBD | |
| | 57.30 | Water demin. | Aqua dem. |
| D | 1.00 | Vitamin E acetate | Tocopheryl Acetate |
| | 0.20 | Bisabolol rac. | Bisabolol |

| | | | |
|---|---|---|---|
| A | 10.00 | Uvinul A Plus B | Ethylhexyl Methoxycinnamate, |
| | | | Diethylamino Hydroxybenzoyl |
| | | | Hexyl Benzoate |
| | 10.00 | Uvinul N 539 T | Octocrylene |
| | 4.00 | Eumulgin VL 75 | Lauryl Glucoside, Polyglyceryl-2 |
| | | | Dipolyhydroxystearate, Glycerin |
| | 8.00 | Cetiol B | Dibutyl Adipate |
| | 8.00 | Finsolv TN | C12-15 Alkyl Benzoate |
| | 12.00 | Myritol 331 | Cocoglycerides |
| | 1.00 | Lanette E | Sodium Cetearyl Sulfate |
| | 2.00 | Lanette O | Cetearyl Alcohol |
| B | 3.00 | Z-COTE MAX | Zinc Oxide (and) Diphenyl |
| | | | Capryl Methicone |
| C | 35.08 | Water demin. | Aqua dem. |
| | 0.38 | Citric acid | Citric Acid |
| | 2.9 | Glycerin 87% | Glycerin |
| | 0.05 | Edeta BD | Disodium EDTA |
| | 0.20 | Allantoin | Allantoin |
| | 0.30 | Keltrol | Xanthan Gum |
| | 0.1% | Fusion protein-KBD | |
| | 1.50 | Veegum Ultra | Magnesium Aluminum Silicate |
| D | 0.50 | Phenonip | |
| | 1.00 | Vitamin E acetate | Tocopheryl Acetate |

| | | | |
|---|---|---|---|
| A | 0.70 | Cremophor A 25 | Ceteareth-25 |
| | 1.70 | Cremophor A 6 | Ceteareth-6, Stearyl Alcohol |
| | 2.00 | Uvinul A Plus | Diethylamino Hydroxybenzoyl Hexyl |
| | | | Benzoate |
| | 3.00 | Uvinul N 539 T | Octocrylene |
| | 3.00 | Z-COTE MAX | Zinc Oxide (and) Diphenyl Capryl |
| | | | methicone |
| | 2.00 | Abil B 8843 | PEG-14 Dimethicone |
| | 3.60 | Lanette O | Cetearyl Alcohol |
| | 4.00 | Uvinul MC 80 | Ethylhexyl Methoxycinnamate |
| | 2.00 | Cetiol B | Dibutyl Adipate |
| B | 4.00 | Glycerin 87% | Glycerin |
| | 0.20 | Edeta BD | Disodium EDTA |
| | 71.00 | Water demin. | Panthenol |
| C | 4.00 | Luvigel EM | Caprylic/Capric Triglyceride, Sodium |
| | | | Acrylates Copolymer |
| D | 1.00 | Vitamin E acetate | Tocopheryl Acetate |
| | 1% | Fusion protein-KBD | |
| | 0.20 | Bisabolol rac. | Bisabolol |
| | q.s. | Preservative | |

| | | | |
|---|---|---|---|
| A | 7.50 | Uvinul MC 80 | Ethylhexyl Methoxycinnamate |
| | 5.00 | Uvinul N 539 T | Octocrylene |
| | 3.00 | Emulgade PL 68/50 | Cetearyl Glucoside, Cetearyl Alcohol |
| | 2.00 | Dracorin 100 SE | Glyceryl Stearate, PEG-100 Stearate |
| | 1.00 | Fitoderm | Squalane |
| | 0.50 | Cremophor WO 7 | PEG-7 Hydrogenated Castor Oil |
| | 0.50 | Cremophor PS 20 | Polysorbate 20 |
| | 2.00 | Dry Flo Pure | Aluminum Starch Octenylsuccinate |
| B | 5.00 | Z-COTE MAX | Zinc Oxide (and) Diphenyl Capryl |
| | | | Methicone |
| | 0.03 | Sicomet Blue P 77 | C.I. 77 007, Ultramarines |
| | | 007 | |
| C | 4.00 | 1,2-Propylene | Propylene Glycol |
| | | Glycol Care | |
| | 2.00 | D-Panthenol 50 P | Panthenol, Propylene Glycol |
| | 0.20 | Keltrol | Xanthan Gum |
| | 0.50 | Simulgel 600 | Acrylamide/Sodium |
| | | | Acryloyldimethyltaurate Copolymer, |
| | | | Isohexadecane, Polysorbate 80 |
| | 0.5% | Fusion protein-KBD | |
| | 65.27 | Water demin. | Aqua dem. |
| | q.s. | Preservative | |
| | 0.50 | Vitamin E acetate | Tocopheryl Acetate |

| | | | |
|---|---|---|---|
| A | 6.00 | Gilugel SIL 5 | Cyclomethicone (and) Aluminum/ |
| | | | Magnesium Hydroxide Stearate |
| | 5.00 | Uvinul N 539 T | Octocrylene |
| | 2.00 | Mexoryl XL | Drometrizole Trisiloxane |
| | 1.00 | Uvinul T 150 | Ethylhexyl Triazone |
| | 3.00 | T-Lite SF-S | Titanium Dioxide, Silica Hydrate, |
| | | | Alumina Hydrate, Methicone/ |
| | | | Dimethicone Copolymer |
| | 5.00 | Finsolv TN | C12-15 Alkyl Benzoate |
| | 4.00 | Abil WE 09 | Polyglyceryl-4 Isostearate, |
| | | | Cetyl PEG/PPG-10/1 Dimethicone, |
| | | | Hexyl Laurate |
| | 2.00 | Cosmacol EMI | Di-C12-13 Alkyl Malate |
| | 3.00 | Isopro palmitate | Isopropyl Palmitate |
| | 5.00 | Abil B 8839 | Cyclopentasiloxane, Cyclohexasiloxane |
| | 0.50 | Abil 350 | Dimethicone |
| B | 0.50 | Sodium chloride | Sodium Chloride |
| | 0.20 | Edeta BD | Disodium EDTA |
| | 1% | Fusion protein-KBD | |
| | 61.30 | Water demin. | Aqua dem. |
| C | 1.00 | Vitamin E acetate | Tocopheryl Acetate |
| | 0.50 | Phenonip | |

| | | | |
|---|---|---|---|
| A | 1.00 | Abil Care 85 | Bis-PEG/PPG-16/16 PEG/PPG- |
| | | | 16/16 Dimethicone, Caprylic/ |
| | | | Capric Triglyceride |
| | 3.00 | Cremophor CO 40 | PEG-40 Hydrogenated Castor Oil |
| | 0.30 | Cremophor WO 7 | PEG-7 Hydrogenated Castor Oil |
| | 5.00 | Uvinul N 539 T | Octocrylene |
| | 10.00 | Witconol APM | PPG-3 Myristyl Ether |
| | 2.00 | Uvinul T 150 | Ethylhexyl Triazone |
| | 1.00 | Dow Corning 345 Fluid | Cyclopentasiloxane, |
| | | | Cyclohexasiloxane |
| | 2.00 | Uvinul A Plus | Diethylamino Hydroxybenzoyl |
| | | | Hexyl Benzoate |
| B | 5.00 | Z-COTE MAX | Zinc Oxide (and) Diphenyl Capryl |
| | | | Silane |
| C | 5.00 | 1,2-Propylene glycol | Propylene Glycol |
| | 0.20 | Keltrol | Xanthan Gum |
| | 0.10 | Edeta BD | Disodium EDTA |
| | 1% | Fusion protein-KBD | |
| | 1.50 | Simulgel 600 | Acrylamide/Sodium |
| | | | Acryloyldimethyltaurate |
| | | | Copolymer, Isohexadecane, |
| | | | Polysorbate 80 |
| | 59.40 | Water demin. | Aqua dem. |
| D | q.s. | Perfume oil | |
| | 0.50 | Glydant | DMDM Hydantoin |

| | | | |
|---|---|---|---|
| A | 7.00 | Uvinul A Plus B | Ethylhexyl Methoxycinnamate, |
| | | | Diethylamino Hydroxybenzoyl |
| | | | Hexyl Benzoate |
| | 1.00 | Tinosorb S | Bis-Ethylhexyloxyphenol |
| | | | Methoxyphenyl Triazine |
| | 1.00 | Uvinul T 150 | Ethylhexyl Triazone |
| | 7.00 | Uvinul N 539 T | Octocrylene |
| | 4.00 | Eumulgin VL 75 | Lauryl Glucoside, Polyglyceryl-2 |
| | | | Dipolyhydroxystearate, Glycerin |
| | 8.00 | Cetiol B | Dibutyl Adipate |
| | 8.00 | Finsolv TN | C12-15 Alkyl Benzoate |
| | 12.00 | Myritol 331 | Cocoglycerides |
| | 1.00 | Lanette E | Sodium Cetearyl Sulfate |
| | 2.00 | Lanette O | Cetearyl Alcohol |
| B | 5.00 | Z-COTE MAX | Zinc Oxide (and) Diphenyl |
| | | | Capryl Methicone |
| C | 35.35 | Water demin. | Aqua dem. |
| | 3.00 | Glycerin 87% | Glycerin |
| | 0.05 | Edeta BD | Disodium EDTA |
| | 0.20 | Allantoin | Allantoin |
| | 0.30 | Keltrol | Xanthan Gum |
| | 0.1% | Fusion protein-KBD | |
| | 1.50 | Veegum Ultra | Magnesium Aluminum Silicate |
| D | 0.50 | Phenonip | |
| | 1.00 | Vitamin E acetate | Tocopheryl Acetate |

| | | | |
|---|---|---|---|
| A | 7.00 | Uvinul A Plus B | Ethyhexyl Methoxycinnamate, |
| | | | Diethylamino Hydroxybenzoyl |
| | | | Hexyl Benzoate |
| | 1.00 | Tinosorb S | Bis-Ethylhexyloxyphenol |
| | | | Methoxyphenyl Triazine |
| | 1.00 | Uvinul T 150 | Ethylhexyl Triazone |
| | 7.00 | Uvinul N 539 T | Octocrylene |
| | 4.00 | Eumulgin VL 75 | Lauryl Glucoside, Polyglyceryl-2 |
| | | | Dipolyhydroxystearate, Glycerin |
| | 8.00 | Cetiol B | Dibutyl Adipate |
| | 8.00 | Finsolv TN | C12-15 Alkyl Benzoate |
| | 12.00 | Myritol 331 | Cocoglycerides |
| | 1.00 | Lanette E | Sodium Cetearyl Sulfate |
| | 2.00 | Lanette O | Cetearyl Alcohol |
| B | 5.00 | T-Lite SF | Titanium Dioxide, Alumina Hydrate, |
| | | | Dimethicone/Methicone Copolymer |
| C | 30.45 | Water demin. | Aqua dem. |
| | 3.00 | Glycerin 87% | Glycerin |
| | 0.05 | Edeta BD | Disodium EDTA |
| | 0.20 | Allantoin | Allantoin |
| | 0.30 | Keltrol | Xanthan Gum |
| | 5% | Fusion protein-KBD | |
| | 1.50 | Veegum Ultra | Magnesium Aluminum Silicate |
| D | 0.50 | Phenonip | |
| | 1.00 | Vitamin E acetate | Tocopheryl Acetate |

| | | |
|---|---|---|
| 5.00 | Z-COTE MAX | Zinc Oxide (and) Diphenyl Capryl |
| | | Methicone |
| 2.00 | Uvinul A Plus | Diethylamino Hydroxybenzoyl Hexyl |
| | | Benzoate |
| 2.00 | Mexoryl XL | Drometrizole Trisiloxane |
| 3.00 | Uvinul MC 80 | Ethylhexyl Methoxycinnamate |
| 0.50 | Abil 350 | Dimethicone |
| 2.75 | Carnico wax LT 20 | Carnauba (Copernica Cerifera) Wax, |
| | | Paraffin |
| 3.70 | Candelilla wax LT 281 | Candelilla (Euphorbia Cerifera) Wax |
| | LJ | |
| 1.80 | Beeswax 3050 PH | Beeswax |
| 3.20 | TeCero wax 30445 | Microcrystalline Wax |
| 3.20 | TeCero wax 1030 K | Microcrystalline Wax |
| 1.34 | Cutina CP | Cetyl Palmitate |
| 6.40 | Vaseline | Petrolatum |
| 7.30 | Softisan 100 | Hydrogenated Coco-Glycerides |
| 10.00 | Luvitol EHO | Cetearyl Ethylhexanoate |
| 0.17 | Bisabolol nat. | Bisabolol |
| 1.84 | Vitamin E acetate | Tocopheryl Acetate |
| 1% | Fusion protein-KBD | |
| 0.42 | D,L-Alpha-Tocopherol | Tocopherol |
| 40.38 | castor oil | Castor (Ricinus Communis) Oil |

| | | | |
|---|---|---|---|
| A | 1.00 | Abil Care 85 | Bis-PEG/PPG-16/16 PEG/PPG- |
| | | | 16/16 Dimethicone, Caprylic/ |
| | | | Capric Triglyceride |
| | 3.00 | Cremophor CO 40 | PEG-40 Hydrogenated Castor Oil |
| | 0.30 | Cremophor WO 7 | PEG-7 Hydrogenated Castor Oil |
| | 2.00 | Mexoryl XL | Drometrizole Trisiloxane |
| | 10.00 | Witconol APM | PPG-3 Myristyl Ether |
| | 1.00 | Uvinul T 150 | Ethylhexyl Triazone |
| | 1.00 | Dow Corning | Cyclopentasiloxane, |
| | | 345 Fluid | Cyclohexasiloxane |
| | 5.00 | Uvinul N 539 T | Octocrylene |
| B | 3.00 | T-Lite SF-S | Titanium Dioxide, Silica Hydrate, |
| | | | Alumina Hydrate, Methicone/ |
| | | | Dimethicone Copolymer |
| C | 5.00 | 1,2-Propylene glycol | Propylene Glycol |
| | 1.00 | Mexoryl SX | Terephthalidene Dicamphor |
| | | | Sulfanic Acid |
| | 0.20 | Keltrol | Xanthan Gum |
| | 0.10 | Edeta BD | Disodium EDTA |
| | 1% | Fusion protein-KBD | |
| | 1.50 | Simulgel 600 | Acrylamide/Sodium |
| | | | Acryloyldimethyltaurate Copolymer, |
| | | | Isohexadecane, Polysorbate 80 |
| | 69.50 | Water demin. | Aqua dem. |
| D | q.s. | Perfume oil | |
| | 0.50 | Glydant | DMDM Hydantoin |

| | | | |
|---|---|---|---|
| A | 1.00 | Abil Care 85 | Bis-PEG/PPG-16/16 PEG/PPG- |
| | | | 16/16 Dimethicone, Caprylic/ |
| | | | Capric Triglyceride |
| | 3.00 | Cremophor CO 40 | PEG-40 Hydrogenated Castor Oil |
| | 0.30 | Cremophor WO 7 | PEG-7 Hydrogenated Castor Oil |
| | 2.00 | Parsol 1789 | Butyl Methoxydibenzoylmethane |
| | 2.00 | Mexoryl XL | Drometrizole Trisiloxane |
| | 10.00 | Witconol APM | PPG-3 Myristyl Ether |
| | 1.00 | Uvinul T 150 | Ethylhexyl Triazone |
| | 1.00 | Dow Corning | Cyclopentasiloxane, |
| | | 345 Fluid | Cyclohexasiloxane |
| | 5.00 | Uvinul N 539 T | Octocrylene |
| B | 3.00 | T-Lite SF-S | Titanium Dioxide, Silica Hydrate, |
| | | | Alumina Hydrate, Methicone/ |
| | | | Dimethicone Copolymer |
| C | 5.00 | 1,2-Propylene | Propylene Glycol |
| | | glycol | |
| | 1.00 | Mexoryl SX | Terephthalidene Dicamphor |
| | | | Sulfanic Acid |
| | 0.20 | Keltrol | Xanthan Gum |
| | 0.10 | Edeta BD | Disodium EDTA |
| | 0.2% | Fusion protein-KBD | |
| | 1.50 | Simulgel 600 | Acrylamide/Sodium |
| | | | Acryloyldimethyltaurate Copolymer, |
| | | | Isohexadecane, Polysorbate 80 |
| | 68.30 | Water demin. | Aqua dem. |
| D | q.s. | Perfume oil | |
| | 0.50 | Glydant | DMDM Hydantoin |

| A | 0.70 Cremophor A 25 | Ceteareth-25 |
|---|---|---|
| | 1.70 Cremophor A 6 | Ceteareth-6, Stearyl Alcohol |
| | 2.00 Parsol 1789 | Butyl Methoxydibenzoylmethane |
| | 5.00 Uvinul N 539 T | Octocrylene |
| | 4.00 Z-COTE MAX | Zinc Oxide (and) Diphenyl Capryl |
| | | methicone |
| | 2.00 Abil B 8843 | PEG-14 Dimethicone |
| | 3.60 Lanette O | Cetearyl Alcohol |
| | 1.00 Uvinul T150 | Ethylhexyl Triazone |
| | 2.00 Cetiol B | Dibutyl Adipate |
| B | 4.00 Glycerin 87% | Glycerin |
| | 0.20 Edeta BD | Disodium EDTA |
| | 71.00 Water demin. | Panthenol |
| C | 4.00 Luvigel EM | Caprylic/Capric Triglyceride, |
| | | Sodium Acrylates Copolymer |
| 1% Fusion protein-KBD | | |
| D | 1.00 Vitamin E acetate | Tocopheryl Acetate |
| | 0.20 Bisabolol rac. | Bisabolol |
| | q.s. Preservative | |

| A | 1.00 Abil Care 85 | Bis-PEG/PPG-16/16 PEG/PPG-16/16 |
|---|---|---|
| | | Dimethicone, Caprylic/Capric |
| | | Triglyceride |
| | 3.00 Cremophor CO 40 | PEG-40 Hydrogenated Castor Oil |
| | 0.30 Cremophor WO 7 | PEG-7 Hydrogenated Castor Oil |
| | 2.00 Parsol 1789 | Butyl Methoxydibenzoylmethane |
| | 2.00 Mexoryl XL | Drometrizole Trisiloxane |
| | 10.00 Witconol APM | PPG-3 Myristyl Ether |
| | 1.00 Uvinul T 150 | Ethylhexyl Triazone |
| | 1.00 Dow Corning 345 | Cyclopentasiloxane, |
| | Fluid | Cyclohexasiloxane |
| | 5.00 Uvinul N 539 T | Octocrylene |
| B | 3.00 Z-COTE MAX | Zinc Oxide (and) Diphenyl Capryl |
| | | Methicone |
| C | 5.00 1,2-Propylene | Propylene Glycol |
| | glycol | |
| | 1.00 Mexoryl SX | Terephthalidene Dicamphor |
| | | Sulfanic Acid |
| | 0.20 Keltrol | Xanthan Gum |
| | 0.10 Edeta BD | Disodium EDTA |
| | 1.50 Simulgel 600 | Acrylamide/Sodium |
| | | Acryloyldimethyltaurate Copolymer, |
| | | Isohexadecane, Polysorbate 80 |
| 0.5% Fusion protein-KBD | | |
| | 68.00 Water demin. | Aqua dem. |
| D | q.s. Perfume oil | |
| | 0.50 Glydant | DMDM Hydantoin |

| A | 2.00 Uvinul A Plus | Diethylamino Hydroxybenzoyl Hexyl |
|---|---|---|
| | | Benzoate |
| | 3.00 Uvinul N 539 T | Octocrylene |
| | 3.00 Emulgade PL 68/50 | Cetearyl Glucoside, Cetearyl Alcohol |
| | 2.00 Dracorin 100 SE | Glyceryl Stearate, PEG-100 Stearate |
| | 1.00 Fitoderm | Squalane |
| | 0.5 Cremophor WO 7 | PEG-7 Hydrogenated Castor Oil |
| | 0.5 Cremophor PS 20 | Polysorbate 20 |
| | 2.00 Dry Flo Pure | Aluminum Starch Octenylsuccinate |
| B | 5.00 Z-COTE MAX | Zinc Oxide (and) Diphenyl Capryl |
| | | methicone |
| C | 4.00 1,2-Propylene | Propylene Glycol |
| | glycol Care | |
| | 0.20 Keltrol | Xanthan Gum |
| | 0.50 Simulgel 600 | Acrylamide/Sodium |
| | | Acryloyldimethyltaurate Copolymer, |
| | | Isohexadecane, Polysorbate 80 |
| | 65.80 Water demin. | Aqua dem. |
| D | 0.50 Euxyl K 300 | |
| | 0.50 Vitamin E acetate | Tocopheryl Acetate |
| 1% Fusion protein-KBD | | |
| | 1.00 RetiSTAR | Caprylic/Capric Triglyceride, Sodium |
| | | Ascorbate, Tocopherol, Retinol |

[0829] Dermocosmetic preparations according to the invention comprising the keratin-binding effector molecule C16-KBD-D (according to SEQ ID No.: 212 in pRee024 (FIG. 8)) prepared analogously to Example 3 are described below. The C16-KBD-D is referred to in the examples below as fusion protein-KDB by way of representation for all of the other KBD fusion proteins described above. It will be appreciated by the person skilled in the art that all of the other specified KBD fusion proteins can also be prepared using the corresponding KBD fusion protein constructs according to Example 3, and be used in the preparations specified below.

### Example 55

### Use of the KBD in an Emulsion for Daycare—O/W Type

| | |
|---|---|
| % | Ingredient (INCI) |

Al 1%:

| | | |
|---|---|---|
| A | 1.7 | Ceteareth-6, Stearyl Alcohol |
| | 0.7 | Ceteareth-25 |
| | 2.0 | Diethylamino Hydroxybenzoyl Hexyl Benzoate |
| | 2.0 | PEG-14 Dimethicone |
| | 3.6 | Cetearyl Alcohol |
| | 6.0 | Ethylhexyl Methoxycinnamate |
| | 2.0 | Dibutyl Adipate |
| B | 5.0 | Glycerin |
| | 0.2 | Disodium EDTA |
| | 1.0 | Panthenol |
| | q.s. | Preservative |
| | 67.8 | Aqua dem. |
| C | 4.0 | Caprylic/Capric Triglyceride, Sodium Acrylates Copolymer |
| D | 0.2 | Sodium Ascorbyl Phosphate |
| | 1.0 | Tocopheryl Acetate |
| | 0.2 | Bisabolol |
| | 1.0 | Caprylic/Capric Triglyceride, Sodium Ascorbate, Tocopherol, |
| | | Retinol |
| | 1.0 | Aqueous solution with about 5% fusion protein-KBD |
| E | q.s. | Sodium Hydroxide |

Al 5%:

| | | |
|---|---|---|
| A | 1.7 | Ceteareth-6, Stearyl Alcohol |
| | 0.7 | Ceteareth-25 |
| | 2.0 | Diethylamino Hydroxybenzoyl Hexyl Benzoate |
| | 2.0 | PEG-14 Dimethicone |
| | 3.6 | Cetearyl Alcohol |
| | 6.0 | Ethylhexyl Methoxycinnamate |
| | 2.0 | Dibutyl Adipate |
| B | 5.0 | Glycerin |
| | 0.2 | Disodium EDTA |
| | 1.0 | Panthenol |
| | q.s. | Preservative |
| | 63.8 | Aqua dem. |
| C | 4.0 | Caprylic/Capric Triglyceride, Sodium Acrylates Copolymer |
| D | 0.2 | Sodium Ascorbyl Phosphate |
| | 1.0 | Tocopheryl Acetate |
| | 0.2 | Bisabolol |
| | 1.0 | Caprylic/Capric Triglyceride, Sodium Ascorbate, Tocopherol, |
| | | Retinol |
| | 5.0 | Aqueous solution with about 5% fusion protein-KBD |
| E | q.s. | Sodium Hydroxide |

Preparation: Heat phases A and B separately from one another to about 80° C.. Stir Phase B into phase A and homogenize. Stir phase C into the combined phases A and B and homogenize again. Cool with stirring to about 40° C., add phase D, adjust the pH to about 6.5 using phase E, homogenize and cool to room temperature with stirring.
Note:
The formulation is prepared without protective gas. Bottling must take place into oxygen-impermeable packagings, e.g. aluminum tubes.

### Example 56

### Use of the KBD in a Protective Day Cream—O/W Type

| | |
|---|---|
| % | Ingredient (INCI) |

Al 1%:

| | | |
|---|---|---|
| A | 1.7 | Ceteareth-6, Stearyl Alcohol |
| | 0.7 | Ceteareth-25 |
| | 2.0 | Diethylamino Hydroxybenzoyl Hexyl Benzoate |
| | 2.0 | PEG-14 Dimethicone |
| | 3.6 | Cetearyl Alcohol |
| | 6.0 | Ethylhexyl Methoxycinnamate |
| | 2.0 | Dibutyl Adipate |
| B | 5.0 | Glycerin |
| | 0.2 | Disodium EDTA |
| | 1.0 | Panthenol |
| | q.s. | Preservative |
| | 68.6 | Aqua dem. |
| C | 4.0 | Caprylic/Capric Triglyceride, Sodium Acrylates Copolymer |
| D | 1.0 | Sodium Ascorbyl Phosphate |
| | 1.0 | Tocopheryl Acetate |
| | 0.2 | Bisabolol |
| | 1.0 | Aqueous solution with about 5% fusion protein-KBD |
| E | q.s. | Sodium Hydroxide |

Al 5%:

| | | |
|---|---|---|
| A | 1.7 | Ceteareth-6, Stearyl Alcohol |
| | 0.7 | Ceteareth-25 |
| | 2.0 | Diethylamino Hydroxybenzoyl Hexyl Benzoate |
| | 2.0 | PEG-14 Dimethicone |
| | 3.6 | Cetearyl Alcohol |
| | 6.0 | Ethylhexyl Methoxycinnamate |
| | 2.0 | Dibutyl Adipate |
| B | 5.0 | Glycerin |
| | 0.2 | Disodium EDTA |
| | 1.0 | Panthenol |
| | q.s. | Preservative |
| | 64.6 | Aqua dem. |
| C | 4.0 | Caprylic/Capric Triglyceride, Sodium Acrylates Copolymer |
| D | 1.0 | Sodium Ascorbyl Phosphate |
| | 1.0 | Tocopheryl Acetate |
| | 0.2 | Bisabolol |
| | 5.0 | Aqueous solution with about 5% fusion protein-KBD |
| E | q.s. | Sodium Hydroxide |

Preparation: Heat phases A and B separately from one another to about 80° C. Stir phase B into phase A and homogenize. Incorporate phase C into the combined phases A and B and homogenize. Cool with stirring to about 40° C. Add phase D, adjust the pH to about 6.5 using phase E and homogenize. Cool to room temperature with stirring.

### Example 57

### Use of the KBD in a Face-Cleansing Lotion—O/W Type

| | |
|---|---|
| % | Ingredient (INCI) |

Al 1%:

| | | |
|---|---|---|
| A | 10.0 | Cetearyl Ethylhexanoate |
| | 10.0 | Caprylic/Capric Triglyceride |
| | 1.5 | Cyclopentasiloxane, Cyclohexasilosane |
| | 2.0 | PEG-40 Hydrogenated Castor Oil |
| B | 3.5 | Caprylic/Capric Triglyceride, Sodium Acrylates Copolymer |
| C | 1.0 | Tocopheryl Acetate |
| | 0.2 | Bisabolol |
| | q.s. | Preservative |
| | q.s. | Perfume oil |
| D | 3.0 | Polyquaternium-44 |
| | 0.5 | Cocotrimonium Methosulfate |
| | 0.5 | Ceteareth-25 |
| | 2.0 | Panthenol, Propylene Glycol |
| | 4.0 | Propylene Glycol |
| | 0.1 | Disodium EDTA |
| | 1.0 | Aqueous solution with about 5% fusion protein-KBD |
| | 60.7 | Aqua dem. |

Al 5%:

| | | |
|---|---|---|
| A | 10.0 | Cetearyl Ethylhexanoate |
| | 10.0 | Caprylic/Capric Triglyceride |
| | 1.5 | Cyclopentasiloxane, Cyclohexasiloxane |
| | 2.0 | PEG-40 Hydrogenated Castor Oil |
| B | 3.5 | Caprylic/Capric Triglyceride, Sodium Acrylates Copolymer |
| C | 1.0 | Tocopheryl Acetate |
| | 0.2 | Bisabolol |
| | q.s. | Preservative |
| | q.s. | Perfume oil |
| D | 3.0 | Polyquaternium-44 |
| | 0.5 | Cocotrimonium Methosulfate |
| | 0.5 | Ceteareth-25 |
| | 2.0 | Panthenol, Propylene Glycol |
| | 4.0 | Propylene Glycol |
| | 0.1 | Disodium EDTA |
| | 5.0 | Aqueous solution with about 5% fusion protein-KBD |
| | 56.7 | Aqua dem. |

Preparation: Dissolve phase A, Stir phase B into phase A. Incorporate phase C into the combined phases A and B. Dissolve phase D, stir into the combined phases A, B and C and homogenize. After-stir for 15 min.

### Example 58

### Use of the KBD in a Daily Care Body Spray

| | |
|---|---|
| % | Ingredient (INCI) |

Al 1%:

| | | |
|---|---|---|
| A | 3.0 | Ethylhexyl Methoxycinnamate |
| | 2.0 | Diethylamino Hydroxybenzoyl Hexyl Benzoate |
| | 1.0 | Polyquaternium-44 |
| | 3.0 | Propylene Glycol |
| | 2.0 | Panthenol, Propylene Glycol |
| | 1.0 | Cyclopentasiloxane, Cyclohexasiloxane |
| | 10.0 | Octyldodecanol |
| | 0.5 | PVP |
| | 10.0 | Caprylic/Capric Triglyceride |
| | 3.0 | C12-15 Alkyl Benzoate |
| | 3.0 | Glycerin |
| | 1.0 | Tocopheryl Acetate |
| | 0.3 | Bisabolol |
| | 1.0 | Aqueous solution with about 5% fusion protein-KBD |
| | 59.2 | Alcohol |

Al 5%:

| | | |
|---|---|---|
| A | 3.0 | Ethylhexyl Methoxycinnamate |
| | 2.0 | Diethylamino Hydroxybenzoyl Hexyl Benzoate |
| | 1.0 | Polyquaternium-44 |
| | 3.0 | Propylene Glycol |
| | 2.0 | Panthenol, Propylene Glycol |
| | 1.0 | Cyclopentasiloxane, Cyclohexasiloxane |
| | 10.0 | Octyldodecanol |
| | 0.5 | PVP |
| | 10.0 | Caprylic/Capric Triglyceride |
| | 3.0 | C12-15 Alkyl Benzoate |
| | 3.0 | Glycerin |
| | 1.0 | Tocopheryl Acetate |
| | 0.3 | Bisabolol |
| | 5.0 | Aqueous solution with about 5% fusion protein-KBD |
| | 55.2 | Alcohol |

Preparation: Weigh in the components of phase A and dissolve until clear.

### Example 59

### Use of the KBD in a Skin Care Gel

| | |
|---|---|
| % | Ingredient (INCI) |

Al 1%:

| | | |
|---|---|---|
| A | 3.6 | PEG-40 Hydrogenated Castor Oil |
| | 15.0 | Alcohol |
| | 0.1 | Bisabolol |
| | 0.5 | Tocopheryl Acetate |
| | q.s. | Perfume oil |
| B | 3.0 | Panthenol |
| | 0.6 | Carbomer |
| | 1.0 | Aqueous solution with about 5% fusion protein-KBD |
| | 75.4 | Aqua dem. |
| C | 0.8 | Triethanolamine |

Al 5%:

| | | |
|---|---|---|
| A | 3.6 | PEG-40 Hydrogenated Castor Oil |
| | 15.0 | Alcohol |
| | 0.1 | Bisabolol |
| | 0.5 | Tocopheryl Acetate |
| | q.s. | Perfume oil |
| B | 3.0 | Panthenol |
| | 0.6 | Carbomer |
| | 5.0 | Aqueous solution with about 5% fusion protein-KBD |
| | 71.4 | Aqua dem. |
| C | 0.8 | Triethanolamine |

Preparation: Dissolve phase A until clear. Allow phase B to swell and neutralize with phase C. Stir phase A into the homogenized phase B and homogenize.

### Example 60

### Use of the KBD in an Aftershave Lotion

| | |
|---|---|
| % | Ingredient (INCI) |

Al 1%:

| | | |
|---|---|---|
| A | 10.0 | Cetearyl Ethylhexanoate |
| | 5.0 | Tocopheryl Acetate |
| | 1.0 | Bisabolol |
| | 0.1 | Perfume oil |
| | 0.3 | Acrylates/C10-30 Alkyl Acrylate Crosspolymer |
| B | 15.0 | Alcohol |
| | 1.0 | Panthenol |
| | 3.0 | Glycerin |
| | 1.0 | Aqueous solution with about 5% fusion protein-KBD |
| | 0.1 | Triethanolamine |
| | 63.5 | Aqua dem. |

Al 5%:

| | | |
|---|---|---|
| A | 10.0 | Cetearyl Ethylhexanoate |
| | 5.0 | Tocopheryl Acetate |
| | 1.0 | Bisabolol |
| | 0.1 | Perfume oil |
| | 0.3 | Acrylates/C10-30 Alkyl Acrylate Crosspolymer |
| B | 15.0 | Alcohol |
| | 1.0 | Panthenol |
| | 3.0 | Glycerin |
| | 5.0 | Aqueous solution with about 5% fusion protein-KBD |
| | 0.1 | Triethanolamine |
| | 59.5 | Aqua dem. |

Preparation: Mix the components of phase A. Dissolve phase B, incorporate into phase A and homogenize.

### Example 61

### Use of the KBD in an Aftersun Lotion

| | |
|---|---|
| % | Ingredient (INCI) |

Al 1%:

| | | |
|---|---|---|
| A | 0.4 | Acrylates/C10-30 Alkyl Acrylate Crosspolymer |
| | 15.0 | Cetearyl Ethylhexanoate |
| | 0.2 | Bisabolol |
| | 1.0 | Tocopheryl Acetate |
| | q.s. | Perfume oil |
| B | 1.0 | Panthenol |
| | 15.0 | Alcohol |
| | 3.0 | Glycerin |
| | 1.0 | Aqueous solution with about 5% fusion protein-KBD |
| | 63.2 | Aqua dem. |
| C | 0.2 | Triethanolamine |

Al 5%:

| | | |
|---|---|---|
| A | 0.4 | Acrylates/C10-30 Alkyl Acrylate Crosspolymer |
| | 15.0 | Cetearyl Ethylhexanoate |
| | 0.2 | Bisabolol |
| | 1.0 | Tocopheryl Acetate |
| | q.s. | Perfume oil |
| B | 1.0 | Panthenol |
| | 15.0 | Alcohol |
| | 3.0 | Glycerin |
| | 5.0 | Aqueous solution with about 5% fusion protein-KBD |
| | 59.2 | Aqua dem. |
| C | 0.2 | Triethanolamine |

Preparation: Mix the components of phase A. Stir phase B into phase A with homogenization. Neutralize with phase C and homogenize again.

### Example 62

### Use of the KBD in a Sunscreen Lotion

| | |
|---|---|
| % | Ingredient (INCI) |

Al 1%:

| | | |
|---|---|---|
| A | 4.5 | Ethylhexyl Methoxycinnamate |
| | 2.0 | Diethylamino Hydroxybenzoyl Hexyl Benzoate |
| | 3.0 | Octocrylene |
| | 2.5 | Di-C12-13 Alkyl Malate |
| | 0.5 | Tocopheryl Acetate |
| | 4.0 | Polyglyceryl-3 Methyl Glucose Distearate |
| B | 3.5 | Cetearyl Isononanoate |
| | 1.0 | VP/Eicosene Copolymer |
| | 5.0 | Isohexadecane |
| | 2.5 | Di-C12-13 Alkyl Malate |
| | 3.0 | Titanium Dioxide, Trimethoxycaprylylsilane |
| C | 5.0 | Glycerin |
| | 1.0 | Sodium Cetearyl Sulfate |
| | 0.5 | Xanthan Gum |
| | 59.7 | Aqua dem. |
| D | 1.0 | Aqueous solution with about 5% fusion protein-KBD |
| | 1.0 | Phenoxyethanol, Methylparaben, Ethylparaben, Butylparaben, |
| | | Propyl-paraben, Isobutylparaben |
| | 0.3 | Bisabolol |

Al 5%:

| | | |
|---|---|---|
| A | 4.5 | Ethylhexyl Methoxycinnamate |
| | 2.0 | Diethylamino Hydroxybenzoyl Hexyl Benzoate |
| | 3.0 | Octocrylene |
| | 2.5 | Di-C12-13 Alkyl Malate |
| | 0.5 | Tocopheryl Acetate |
| | 4.0 | Polyglyceryl-3 Methyl Glucose Distearate |
| B | 3.5 | Cetearyl Isononanoate |
| | 1.0 | VP/Eicosene Copolymer |
| | 5.0 | Isohexadecane |
| | 2.5 | Di-C12-13 Alkyl Malate |
| | 3.0 | Titanium Dioxide, Trimethoxycaprylylsilane |
| C | 5.0 | Glycerin |
| | 1.0 | Sodium Cetearyl Sulfate |
| | 0.5 | Xanthan Gum |
| | 55.7 | Aqua dem. |
| D | 5.0 | Aqueous solution with about 5% fusion protein-KBD |
| | 1.0 | Phenoxyethanol, Methylparaben, Ethylparaben, Butylparaben, |
| | | Propyl-paraben, Isobutylparaben |
| | 0.3 | Bisabolol |

Preparation: Heat the components of phases A and B separately from one another to about 80° C.. Stir phase B into phase A and homogenize. Heat phase C to about 80° C. and stir into the combined phases A and B with homogenization. Cool to about 40° C. with stirring, add phase D and homogenize again.

### Example 63

### Use of the KBD in a Sunscreen Lotion—O/W Type

| | |
|---|---|
| % | Ingredient (INCI) |

Al 1%:

| | | |
|---|---|---|
| A | 2.0 | Ceteareth-6, Stearyl Alcohol |
| | 2.0 | Ceteareth-25 |
| | 3.0 | Tribehenin |
| | 2.0 | Cetearyl Alcohol |
| | 2.0 | Cetearyl Ethylhexanoate |
| | 5.0 | Ethylhexyl Methoxycinnamate |
| | 1.0 | Ethylhexyl Triazone |
| | 1.0 | VP/Eicosene Copolymer |
| | 7.0 | Isopropyl Myristate |
| B | 5.0 | Zinc Oxide, Triethoxycaprylylsilane |
| C | 0.2 | Xanthan Gum |
| | 0.5 | Hydroxyethyl Acrylate/Sodium Acryloyldimethyl |
| | | Taurate Copolymer, Squalane, Polysorbate 60 |
| | 0.2 | Disodium EDTA |
| | 5.0 | Propylene Glycol |
| | 0.5 | Panthenol |
| | 60.9 | Aqua dem. |
| D | 1.0 | Aqueous solution with about 5% fusion protein-KBD |
| | 0.5 | Phenoxyethanol, Methylparaben, Butylparaben, |
| | | Ethylparaben, Propyl-paraben, Isopropylparaben |
| | 1.0 | Tocopheryl Acetate |
| | 0.2 | Bisabolol |

Al 5%:

| | | |
|---|---|---|
| A | 2.0 | Ceteareth-6, Stearyl Alcohol |
| | 2.0 | Ceteareth-25 |
| | 3.0 | Tribehenin |
| | 2.0 | Cetearyl Alcohol |
| | 2.0 | Cetearyl Ethylhexanoate |
| | 5.0 | Ethylhexyl Methoxycinnamate |
| | 1.0 | Ethylhexyl Triazone |
| | 1.0 | VP/Eicosene Copolymer |
| | 7.0 | Isopropyl Myristate |
| B | 5.0 | Zinc Oxide, Triethoxycaprylylsilane |
| C | 0.2 | Xanthan Gum |
| | 0.5 | Hydroxyethyl Acrylate/Sodium Acryloyldimethyl |
| | | Taurate Copolymer, Squalane, Polysorbate 60 |
| | 0.2 | Disodium EDTA |
| | 5.0 | Propylene Glycol |
| | 0.5 | Panthenol |
| | 56.9 | Aqua dem. |
| D | 5.0 | Aqueous solution with about 5% fusion protein-KBD |
| | 0.5 | Phenoxyethanol, Methylparaben, Butylparaben, |
| | | Ethylparaben, Propylparaben, Isopropylparaben |
| | 1.0 | Tocopheryl Acetate |
| | 0.2 | Bisabolol |

Preparation: Heat phase A to about 80° C., stir in phase B and homogenize for 3 min. Likewise heat phase C to 80° C. and stir into the combined phases A and B with homogenization. Cool to about 40° C., stir in phase D and homogenize again.

### Example 64

### Use of the KBD in a Sunscreen Lotion—O/W Type

| | |
|---|---|
| % | Ingredient (INCI) |

Al 1%:

| | | |
|---|---|---|
| A | 3.5 | Ceteareth-6, Stearyl Alcohol |
| | 1.5 | Ceteareth-25 |
| | 7.5 | Ethylhexyl Methoxycinnamate |
| | 2.0 | Diethylamino Hydroxybenzoyl Hexyl Benzoate |
| | 2.0 | Cyclopentasiloxane, Cyclohexasiloxane |
| | 0.5 | Beeswax |
| | 3.0 | Cetearyl Alcohol |
| | 10.0 | Caprylic/Capric Triglyceride |
| B | 5.0 | Titanium Dioxide, Silica, Methicone, Alumina |
| C | 3.0 | Glycerin |
| | 0.2 | Disodium EDTA |
| | 0.3 | Xanthan Gum |
| | 1.0 | Decyl Glucoside |
| | 2.0 | Panthenol, Propylene Glycol |
| | 56.3 | Aqua dem. |
| D | 1.0 | Aqueous solution with about 5% fusion protein-KBD |
| | 1.0 | Tocopheryl Acetate |
| | 0.2 | Bisabolol |
| | q.s. | Perfume oil |
| | q.s. | Preservative |

Al 5%:

| | | |
|---|---|---|
| A | 3.5 | Ceteareth-6, Stearyl Alcohol |
| | 1.5 | Ceteareth-25 |
| | 7.5 | Ethylhexyl Methoxycinnamate |
| | 2.0 | Diethylamino Hydroxybenzoyl Hexyl Benzoate |
| | 2.0 | Cyclopentasiloxane, Cyclohexasiloxane |
| | 0.5 | Beeswax |
| | 3.0 | Cetearyl Alcohol |
| | 10.0 | Caprylic/Capric Triglyceride |
| B | 5.0 | Titanium Dioxide, Silica, Methicone, Alumina |
| C | 3.0 | Glycerin |
| | 0.2 | Disodium EDTA |
| | 0.3 | Xanthan Gum |
| | 1.0 | Decyl Glucoside |
| | 2.0 | Panthenol, Propylene Glycol |
| | 52.3 | Aqua dem. |
| D | 5.0 | Aqueous solution with about 5% fusion protein-KBD |
| | 1.0 | Tocopheryl Acetate |
| | 0.2 | Bisabolol |
| | q.s. | Perfume oil |
| | q.s. | Preservative |

Preparation: Heat phase A to about 80° C., stir in phase B and homogenize for 3 min. Likewise heat phase C to 80° C. and stir into the combined phases A and B with homogenization. Cool to about 40° C., stir in phase D and homogenize again.

### Example 65

### Use of the KBD in a Foot Balsam

| | |
|---|---|
| % | Ingredient (INCI) |

Al 1%:

| | | |
|---|---|---|
| A | 2.0 | Ceteareth-6, Stearyl Alcohol |
| | 2.0 | Ceteareth-25 |
| | 5.0 | Cetearyl Ethylhexanoate |
| | 4.0 | Cetyl Alcohol |
| | 4.0 | Glyceryl Stearate |
| | 5.0 | Mineral Oil |
| | 0.2 | Menthol |
| | 0.5 | Camphor |
| B | 69.3 | Aqua dem. |
| | q.s. | Preservative |
| C | 1.0 | Bisabolol |
| | 1.0 | Tocopheryl Acetate |
| D | 1.0 | Aqueous solution with about 5% fusion protein-KBD |
| | 5.0 | Witch Hazel Extract |

Al 5%:

| | | |
|---|---|---|
| A | 2.0 | Ceteareth-6, Stearyl Alcohol |
| | 2.0 | Ceteareth-25 |
| | 5.0 | Cetearyl Ethylhexanoate |
| | 4.0 | Cetyl Alcohol |
| | 4.0 | Glyceryl Stearate |
| | 5.0 | Mineral Oil |
| | 0.2 | Menthol |
| | 0.5 | Camphor |
| B | 65.3 | Aqua dem. |
| | q.s. | Preservative |
| C | 1.0 | Bisabolol |
| | 1.0 | Tocopheryl Acetate |
| D | 5.0 | Aqueous solution with about 5% fusion protein-KBD |
| | 5.0 | Witch Hazel Extract |

Preparation: Heat the components of phases A and B separately from one another to about 80° C.. Stir phase B into phase A with homogenization. Cool to about 40° C. with stirring, add phases C and D and briefly after-homogenize. Cool to room temperature with stirring.

### Example 66

### Use of the KBD in a W/O Emulsion with Bisabolol

| | |
|---|---|
| % | Ingredient (INCI) |

Al 1%:

| | | |
|---|---|---|
| A | 6.0 | PEG-7 Hydrogenated Castor Oil |
| | 8.0 | Cetearyl Ethylhexanoate |
| | 5.0 | Isopropyl Myristate |
| | 15.0 | Mineral Oil |
| | 0.3 | Magnesium Stearate |
| | 0.3 | Aluminum Stearate |
| | 2.0 | PEG-45/Dodecyl Glycol Copolymer |
| B | 5.0 | Glycerin |
| | 0.7 | Magnesium Sulfate |
| | 55.6 | Aqua dem. |
| C | 1.0 | Aqueous solution with about 5% fusion protein-KBD |
| | 0.5 | Tocopheryl Acetate |
| | 0.6 | Bisabolol |

Al 5%:

| | | |
|---|---|---|
| A | 6.0 | PEG-7 Hydrogenated Castor Oil |
| | 8.0 | Cetearyl Ethylhexanoate |
| | 5.0 | Isopropyl Myristate |
| | 15.0 | Mineral Oil |
| | 0.3 | Magnesium Stearate |
| | 0.3 | Aluminum Stearate |
| | 2.0 | PEG-45/Dodecyl Glycol Copolymer |
| B | 5.0 | Glycerin |
| | 0.7 | Magnesium Sulfate |
| | 51.6 | Aqua dem. |
| C | 5.0 | Aqueous solution with about 5% fusion protein-KBD |
| | 0.5 | Tocopheryl Acetate |

Preparation: Heat phases A and B separately from one another to about 85° C.. Stir phase B into phase A and homogenize. Cool to about 40° C. with stirring, add phase C and briefly homogenize again. Cool to room temperature with stirring.
List of formulations for patent keratin-binding domain - hair care

### Example 67

### Shower Gel

| | |
|---|---|
| % | Ingredient (INCI) |

Al 1%

| | | |
|---|---|---|
| A | 40.0 | Sodium Laureth Sulfate |
| | 5.0 | Decyl Glucoside |
| | 5.0 | Cocamidopropyl Betaine |
| | 1.0 | Aqueous solution with about 5% fusion protein-KBD |
| | 1.0 | Panthenol |
| | q.s. | Perfume oil |
| | q.s. | Preservative |
| | 2.0 | Sodium Chloride |
| | 46.0 | Aqua dem. |
| B | q.s. | Citric Acid |

Al 5%

| | | |
|---|---|---|
| A | 40.0 | Sodium Laureth Sulfate |
| | 5.0 | Decyl Glucoside |
| | 5.0 | Cocamidopropyl Betaine |
| | 5.0 | Aqueous solution with about 5% fusion protein-KBD |
| | 1.0 | Panthenol |
| | q.s. | Perfume oil |
| | q.s. | Preservative |
| | 2.0 | Sodium Chloride |
| | 42.0 | Aqua dem. |
| B | q.s. | Citric Acid |

Preparation: Mix the components of phase A and dissolve. Adjust the pH to 6-7 with citric acid.

### Example 68

### Moisturizing Body Care Cream

| | |
|---|---|
| % | Ingredient (INCI) |

Al 1%

| | | |
|---|---|---|
| A | 2.0 | Ceteareth-25 |
| | 2.0 | Ceteareth-6, Stearyl Alcohol |
| | 3.0 | Cetearyl Ethylhexanoate |
| | 1.0 | Dimethicone |
| | 4.0 | Cetearyl Alcohol |
| | 3.0 | Glyceryl Stearate SE |
| | 5.0 | Mineral Oil |
| | 4.0 | Simmondsia Chinensis (Jojoba) Seed Oil |
| | 3.0 | Mineral Oil, Lanolin Alcohol |
| B | 5.0 | Propylene Glycol |
| | 1.0 | Aqueous solution with about 5% fusion protein-KBD |
| | 1.0 | Panthenol |
| | 0.5 | Magnesium Aluminum Silicate |
| | q.s | Preservative |
| | 65.5 | Aqua dem. |
| C | q.s. | Perfume oil |
| D | q.s. | Citric Acid |

Al 5%

| | | |
|---|---|---|
| A | 2.0 | Ceteareth-25 |
| | 2.0 | Ceteareth-6, Stearyl Alcohol |
| | 3.0 | Cetearyl Ethylhexanoate |
| | 1.0 | Dimethicone |
| | 4.0 | Cetearyl Alcohol |
| | 3.0 | Glyceryl Stearate SE |
| | 5.0 | Mineral Oil |
| | 4.0 | Simmondsia Chinensis (Jojoba) Seed Oil |
| | 3.0 | Mineral Oil, Lanolin Alcohol |
| B | 5.0 | Propylene Glycol |
| | 5.0 | Aqueous solution with about 5% fusion protein-KBD |
| | 1.0 | Panthenol |
| | 0.5 | Magnesium Aluminum Silicate |
| | q.s | Preservative |
| | 61.5 | Aqua dem. |
| C | q.s. | Perfume oil |
| D | q.s. | Citric Acid |

Preparation: Heat phases A and B separately to about 80° C.. Briefly prehomogenize phase B, then stir phase B into phase A and homogenize again. Cool to about 40° C., add phase C and homogenize thoroughly again. Adjust the pH to 6-7 with citric acid.

### Example 69

### Moisturizing Body Care Cream

| | |
|---|---|
| % | Ingredient (INCI) |

Al 1%

| | | |
|---|---|---|
| A | 6.0 | PEG-7 Hydrogenated Castor Oil |
| | 10.0 | Cetearyl Ethylhexanoate |
| | 5.0 | Isopropyl Myristate |
| | 7.0 | Mineral Oil |
| | 0.5 | Shea Butter (Butyrospermum Parkii) |
| | 0.5 | Aluminum Stearate |
| | 0.5 | Magnesium Stearate |
| | 0.2 | Bisabolol |
| | 0.7 | Quaternium-18-Hectorite |
| B | 5.0 | Dipropylene Glycol |
| | 0.7 | Magnesium Sulfate |
| | q.s. | Preservative |
| | 62.9 | Aqua dem. |
| C | q.s. | Perfume oil |
| | 1.0 | Aqueous solution with about 5% fusion protein-KBD |

Al 5%

| | | |
|---|---|---|
| A | 6.0 | PEG-7 Hydrogenated Castor Oil |
| | 10.0 | Cetearyl Ethylhexanoate |
| | 5.0 | Isopropyl Myristate |
| | 7.0 | Mineral Oil |
| | 0.5 | Shea Butter (Butyrospermum Parkii) |
| | 0.5 | Aluminum Stearate |
| | 0.5 | Magnesium Stearate |
| | 0.2 | Bisabolol |
| | 0.7 | Quaternium-18-Hectorite |
| B | 5.0 | Dipropylene Glycol |
| | 0.7 | Magnesium Sulfate |
| | q.s. | Preservative |
| | 58.9 | Aqua dem. |
| C | q.s. | Perfume oil |
| | 5.0 | Aqueous solution with about 5% fusion protein-KBD |

Preparation: Heat phases A and B separately to about 80° C. Stir phase B into phase A and homogenize. Cool to about 40° C. with stirring, add phase C and homogenize again. Allow to cool to room temperature with stirring.

### Example 70

### Liquid Make-Up—O/W Type

| | |
|---|---|
| % | Ingredient (INCI) |

Al 1%

| | | |
|---|---|---|
| A | 2.0 | Ceteareth-6, Stearyl Alcohol |
| | 2.0 | Ceteareth-25 |
| | 6.0 | Glyceryl Stearate |
| | 1.0 | Cetyl Alcohol |
| | 8.0 | Mineral Oil |
| | 7.0 | Cetearyl Ethylhexanoate |
| | 0.2 | Dimethicone |
| B | 3.0 | Propylene Glycol |
| | 1.0 | Panthenol |
| | q.s. | Preservative |
| | 61.9 | Aqua dem. |
| C | 0.1 | Bisabolol |
| | 1.0 | Aqueous solution with about 5% fusion protein-KBD |
| | q.s. | Perfume oil |
| D | 5.7 | C.I. 77 891, Titanium Dioxide |
| | 1.1 | Iron Oxides |

Al 5%

| | | |
|---|---|---|
| A | 2.0 | Ceteareth-6, Stearyl Alcohol |
| | 2.0 | Ceteareth-25 |
| | 6.0 | Glyceryl Stearate |
| | 1.0 | Cetyl Alcohol |
| | 8.0 | Mineral Oil |
| | 7.0 | Cetearyl Ethylhexanoate |
| | 0.2 | Dimethicone |
| B | 3.0 | Propylene Glycol |
| | 1.0 | Panthenol |
| | q.s. | Preservative |
| | 57.9 | Aqua dem. |
| C | 0.1 | Bisabolol |
| | 5.0 | Aqueous solution with about 5% fusion protein-KBD |
| | q.s. | Perfume oil |
| D | 57 | C.I. 77 891, Titanium Dioxide |
| | 1.1 | Iron Oxides |

Preparation: Heat phases A and B separately to about 80° C.. Stir phase B into phase A and homogenize. Cool to about 40° C. with stirring, add phases C and D and thoroughly homogenize again. Allow to cool to room temperature with stirring.

### Example 71

[0846] Dermocosmetic preparations according to the invention are described below, comprising the keratin-binding effector molecule C16-KBD-D (according to SEQ ID No.: 212 in pRee024 (FIG. 8)) prepared according to Example 3. The specified keratin-binding fusion protein is used as about 5% strength by weight aqueous solution. The following data are parts by weight.

Gel cream

| | 1 | 2 | 3 | 4 |
|---|---|---|---|---|
| Acrylates/C10-30 Alkylacrylate | 0.40 | 0.35 | 0.40 | 0.35 |
| Crosspolymer | | | | |
| Carbomer | 0.20 | 0.22 | 0.20 | 0.22 |
| Xanthan Gum | 0.10 | 0.13 | 0.10 | 0.13 |
| Cetearyl Alcohol | 3.00 | 2.50 | 3.00 | 2.50 |
| C12-15 Alkyl Benzoate | 4.00 | 4.50 | 4.00 | 4.50 |
| Caprylic/Capric Triglyceride | 3.00 | 3.50 | 3.00 | 3.50 |
| Uvinul ® A Plus ™ | 2.00 | 1.50 | 0.75 | 1.00 |
| UvaSorb ® k2A | | 3.00 | | |
| Ethylhexyl Bis- | | | | |
| Isopentylbenzoxazolylphenyl | | | | |
| Melamine | | | | |
| Uvinul ® MC 80 | 3.00 | | 1.00 | |
| Bis-Ethylhexyloxyphenol | | 1.50 | | 2.00 |
| Methoxyphenyl Triazine | | | | |
| Butyl Methoxydibenzoylmethane | | | 2.00 | |
| Disodium Phenyl Dibenzimidazole | 2.50 | | 0.50 | 2.00 |
| Tetrasulfonate | | | | |
| Uvinul ® T 150 | 4.00 | | 3.00 | 4.00 |
| Octocrylene | | 4.00 | | |
| Diethylhexyl Butamido Triazone | 1.00 | | | 2.00 |
| Phenylbenzimidazole Sulfonic | 0.50 | | 3.00 | |
| Acid | | | | |
| Methylene Bis-Benzotriazolyl | 2.00 | | 0.50 | 1.50 |
| Tetramethylbutyl phenol | | | | |
| Ethylhexyl Salicylate | | | 3.00 | |
| Drometrizole Trisiloxane | | | 0.50 | |
| Terephthalidene Dicamphor | | 1.50 | | 1.00 |
| Sulfonic Acid | | | | |
| Diethylhexyl 2,6-Naphthalate | 3.50 | 4.00 | 7.00 | 9.00 |
| Titanium Dioxide-microfine | 1.00 | | 3.00 | |
| Zinc Oxide-microfine | | | | 0.25 |
| Fusion protein-KBD | 2.0 | 0.5 | 1.0 | 10.0 |
| Cyclomethicone | 5.00 | 5.50 | 5.00 | 5.50 |
| Dimethicone | 1.00 | 0.60 | 1.00 | 0.60 |
| Glycerin | 1.00 | 1.20 | 1.00 | 1.20 |
| Sodium Hydroxide | q.s. | q.s. | q.s. | q.s. |
| Preservative | 0.30 | 0.23 | 0.30 | 0.23 |
| Perfume oil | 0.20 | | 0.20 | |
| Aqua dem. | ad 100 | ad 100 | ad 100 | ad 100 |
| adjust pH to 6.0 | | | | |

OW sunscreen formulation

| | 1 | 2 | 3 | 4 | 5 | 6 | 7 |
|---|---|---|---|---|---|---|---|
| Glyceryl Stearate SE | 0.50 | 1.00 | 3.00 | | | 1.50 | |
| Glyceryl Stearate Citrate | 2.00 | | 1.00 | 2.00 | 4.00 | | |
| Stearic Acid | | 3.00 | | 2.00 | | | |
| PEG-40 Stearate | 0.50 | | | | | 2.00 | |
| Cetyl Phosphate | | | | | | 1.00 | |
| Sodium Cetearyl Sulfate | | | | | | | 0.75 |
| Stearyl Alcohol | | | 3.00 | | | 2.00 | 0.60 |
| Cetyl Alcohol | 2.50 | 1.10 | | 1.50 | 0.60 | | 2.00 |
| Fusion protein-KBD | 10.0 | 0.5 | 3.0 | 5.0 | 0.1 | 0.02 | 7.5 |
| Uvinul ® A Plus ™ | 2.00 | 1.50 | 0.75 | 1.00 | 2.10 | 4.50 | 5.00 |
| UvaSorb ® k2A | | | | | | | |
| Ethylhexyl Bis- | | | | | | | |
| Isopentylbenzoxazolylphenyl | | | | | | | |
| Melamine | | | | | | | |
| Ethylhexyl Methoxycinnamate | | | | | 5.00 | 6.00 | 8.00 |
| Uvinul ® MC 80 | | | | | | | |
| Bis-Ethylhexyloxyphenol | | 1.50 | | 2.00 | 2.50 | | 2.50 |
| Methoxyphenyl Triazine | | | | | | | |
| Butyl Methoxydibenzoylmethane | | | 2.00 | | 2.00 | 1.50 | |
| Disodium Phenyl Dibenzimidazole | 2.50 | | 0.50 | 2.00 | | 0.30 | |
| Tetrasulfonate | | | | | | | |
| Ethyhexyl Triazone Uvinul ® T 150 | 4.00 | | 3.00 | 4.00 | | 2.00 | |
| Octocrylene | | 4.00 | | | | | 7.50 |
| Diethylhexyl Butamido Triazone | 1.00 | | | 2.00 | 1.00 | | 1.00 |
| Phenylbenzimidazole Sulfonic Acid | 0.50 | | 3.00 | | | | |
| Methylene Bis-Benzotriazolyl | 2.00 | | 0.50 | 1.50 | 2.50 | | |
| Tetramethylbutylphenol | | | | | | | |
| Ethylhexyl Salicylate | | | 3.00 | | | | 5.00 |
| Drometrizole Trisiloxane | | | 0.50 | | | 1.00 | |
| Terephthalidene Dicamphor | | 1.50 | | 1.00 | 1.00 | | 0.50 |
| Sulfonic Acid | | | | | | | |
| Diethylhexyl 2,6-Naphthalate | 3.50 | | 7.00 | | 6.00 | 9.00 | |
| Titanium Dioxide-microfine | 1.00 | | 3.00 | | 3.50 | | 1.50 |
| Zinc Oxide-microfine | | | | 0.25 | | 2.00 | |
| C12-15 Alkyl Benzoate | | 0.25 | | | 4.00 | 7.00 | |
| Dicapryl Ether | | | 3.50 | | 2.00 | | |
| Butylene Glycol | 5.00 | | 6.00 | | | | |
| Dicaprylate/Dicaprate | | | | | | | |
| Cocoglyceride | | | 6.00 | | 2.00 | | |
| Dimethicone | 0.50 | | 1.00 | | 2.00 | | |
| Cyclomethicone | 2.00 | | 0.50 | | 0.50 | | |
| Butyrospermum Parkii (Shea | | 2.00 | | | | | |
| Butter) | | | | | | | |
| VP/Hexadecene Copolymer | 0.20 | | | 0.50 | | 1.00 | |
| Glycerin | 3.00 | 7.50 | | 7.50 | 5.00 | | 2.50 |
| Xanthan Gum | 0.15 | | 0.05 | | | 0.30 | |
| Sodium Carbomer | | 0.20 | | 0.15 | 0.25 | | |
| Vitamin E Acetate | 0.60 | | 0.23 | | 0.70 | 1.00 | |
| Biosaccaride Gum-1 | | 3.00 | 10.00 | | | | |
| Glycine Soya (Soybean) Oil | | | | 0.50 | | 1.50 | 1.00 |
| Ethylhexylglycerin | 0.30 | | | | | | |
| DMDM Hydantoin | | 0.60 | 0.40 | 0.20 | | | |
| Iodopropynyl Butylcarbamate | | | | 0.18 | 0.20 | | |
| Methylparaben | 0.15 | | 0.25 | | 0.50 | | |
| Phenoxyethanol | 1.00 | 0.40 | | | 0.40 | 0.50 | 0.40 |
| Trisodium EDTA | 0.02 | | 0.05 | | | | |
| Tetrasodium Iminodisuccinate | | | | 0.25 | 1.00 | | |
| Ethanol | 2.00 | 1.50 | | 3.00 | | 1.20 | 5.00 |
| Perfume oil | 0.10 | 0.25 | 0.30 | | 0.40 | 0.20 | |
| Aqua dem. | ad 100 | ad 100 | ad 100 | ad 100 | ad 100 | ad 100 | ad 100 |

Hydrodispersion

| | 1 | 2 | 3 | 4 | 5 |
|---|---|---|---|---|---|
| Ceteareth-20 | 1.00 | | | 0.50 | |
| Cetyl Alcohol | | | 1.00 | | |
| Sodium Carbomer | | 0.20 | | 0.30 | |
| Acrylates/C10-30 Alkyl Acrylate | 0.50 | | 0.40 | 0.10 | 0.50 |
| Crosspolymer | | | | | |
| Xanthan Gum | | 0.30 | 0.15 | | |
| Fusion protein-KBD | 5.0 | 0.5 | 3.0 | 0.1 | 10.0 |
| Uvinul ® A Plus ™ | 2.00 | 1.50 | 0.75 | 1.00 | 2.10 |
| UvaSorb ® k2A Ethylhexyl Bis- | | 3.50 | | | |
| Isopentylbenzoxazolylphenyl Melamine | | | | | |
| Ethylhexyl Methoxycinnamate Uvinul ® MC | | | | | 5.00 |
| 80 | | | | | |
| Bis-Ethylhexyloxyphenol Methoxyphenyl | | 1.50 | | 2.00 | 2.50 |
| Triazine | | | | | |
| Butyl Methoxydibenzoylmethane | | | 2.00 | | 2.00 |
| Disodium Phenyl Dibenzimidazole | 2.50 | | 0.50 | 2.00 | |
| Tetrasulfonate | | | | | |
| Ethyhexyl Triazone Uvinul ® T 150 | 4.00 | | 3.00 | 4.00 | |
| Octocrylene | | 4.00 | | | |
| Diethylhexyl Butamido Triazone | 1.00 | | | 2.00 | 1.00 |
| Phenylbenzimidazole Sulfonic Acid | 0.50 | | 3.00 | | |
| Methylene Bis-Benzotriazolyl | 2.00 | | 0.50 | 1.50 | 2.50 |
| Tetramethylbutylphenol | | | | | |
| Ethylhexyl Salicylate | | | 3.00 | | |
| Drometrizole Trisiloxane | | | 0.50 | | |
| Terephthalidene Dicamphor Sulfonic Acid | | 1.50 | | 1.00 | 1.00 |
| Diethylhexyl 2,6-Naphthalate | | | 7.00 | | 9.00 |
| Titanium Dioxide-microfine | 1.00 | | 3.00 | | 3.50 |
| Zinc Oxide-microfine | | | | 0.25 | |
| C12-15 Alkyl Benzoate | 2.00 | 2.50 | | | |
| Dicapryl Ether | | 4.00 | | | |
| Butylene Glycol Dicaprylate/Dicaprate | 4.00 | | 2.00 | 6.00 | |
| Dicapryl Carbonate | | 2.00 | 6.00 | | |
| Dimethicone | | 0.50 | 1.00 | | |
| Phenyl Trimethicone | 2.00 | | 0.50 | | |
| Butyrospermum Parkii (Shea Butter) | | 2.00 | | 5.00 | |
| VP/Hexadecene Copolymer | 0.50 | | | 0.50 | 1.00 |
| Tricontanyl PVP | 0.50 | | 1.00 | | |
| Ethylhexylglycerin | | | 1.00 | | 0.80 |
| Glycerin | 3.00 | 7.50 | | 7.50 | 8.50 |
| Glycine Soya (Soybean) Oil | | | 1.50 | | 1.00 |
| Vitamin E Acetate | 0.50 | | 0.25 | | 1.00 |
| Glucosylrutin | 0.60 | | | 0.25 | |
| Biosaccaride Gum-1 | | 2.50 | 0.50 | | 2.00 |
| DMDM Hydantoin | | 0.60 | 0.45 | 0.25 | |
| Iodopropynyl Butylcarbamate | 0.20 | | | | |
| Methylparaben | 0.50 | | 0.25 | 0.15 | |
| Phenoxyethanol | 0.50 | 0.40 | | 1.00 | |
| Trisodium EDTA | | 0.01 | 0.05 | | 0.10 |
| Ethanol | 3.00 | 2.00 | 1.50 | | 7.00 |
| Perfume oil | 0.20 | | 0.05 | 0.40 | |
| Aqua dem. | ad 100 | ad 100 | ad 100 | ad 100 | ad 100 |

WO sunscreen emulsion

| | 1 | 2 | 3 | 4 | 5 |
|---|---|---|---|---|---|
| Cetyl Dimethicone | | 2.50 | | 4.00 | |
| Polyglyceryl-2 Dipolyhydroxystearate | 5.00 | | | | 4.50 |
| PEG-30 Dipolyhydroxystearate | | | 5.00 | | |
| Fusion protein-KBD | 5.0 | 1.0 | 10.0 | 0.5 | 0.1 |
| Uvinul ® A Plus ™ | 2.00 | 1.50 | 0.75 | 1.00 | 2.10 |
| UvaSorb ® k2A | | 2.00 | | | |
| Ethylhexyl Bis-Isopentylbenzoxazolylphenyl | | | | | |
| Melamine | | | | | |
| Ethylhexyl Methoxycinnamate Uvinul ® MC | | | | | 5.00 |
| 80 | | | | | |
| Bis-Ethylhexyloxyphenol Methoxyphenyl | | 1.50 | | 2.00 | 2.50 |
| Triazine | | | | | |
| Butyl Methoxydibenzoylmethane | | | 2.00 | | 2.00 |
| Disodium Phenyl Dibenzimidazole | 2.50 | | 0.50 | 2.00 | |
| Tetrasulfonate | | | | | |
| Ethylhexyl Triazone Uvinul ® T 150 | 4.00 | | 3.00 | 4.00 | |
| Octocrylene | | 4.00 | | | |
| Diethylhexyl Butamido Triazone | 1.00 | | | 2.00 | 1.00 |
| Phenylbenzimidazole Sulfonic Acid | 0.50 | | 3.00 | | |
| Methylene Bis-Benzotriazolyl | 2.00 | | 0.50 | 1.50 | 2.50 |
| Tetramethylbutylphenol | | | | | |
| Ethylhexyl Salicylate | | | 3.00 | | |
| Drometrizole Trisiloxane | | | 0.50 | | |
| Terephthalidene Dicamphor Sulfonic Acid | | 1.50 | | 1.00 | 1.00 |
| Diethylhexyl 2,6-Naphthalate | | | 7.00 | | 4.00 |
| Titanium Dioxide-microfine | 1.00 | | 3.00 | | 3.50 |
| Zinc Oxide-microfine | | | | 0.25 | |
| Mineral Oil | | 12.00 | 10.00 | | 8.00 |
| C12-15 Alkyl Benzoate | | | | 9.00 | |
| Dicaprylyl Ether | 10.00 | | | | 7.00 |
| Butylene Glycol Dicaprylate/Dicaprate | | | 2.00 | 8.00 | 4.00 |
| Dicaprylyl Carbonate | 5.00 | | 6.00 | | |
| Dimethicone | | 4.00 | 1.00 | 5.00 | |
| Cyclomethicone | 2.00 | 25.00 | | | 2.00 |
| Butyrospermum Parkii (Shea Butter) | | | 3.00 | | |
| Petrolatum | | 4.50 | | | |
| VP/Hexadecene Copolymer | 0.50 | | | 0.50 | 1.00 |
| Ethylhexylglycerin | | 0.30 | 1.00 | | 0.50 |
| Glycerin | 3.00 | 7.50 | | 7.50 | 8.50 |
| Glycine Soya (Soybean) Oil | | 1.00 | 1.50 | | 1.00 |
| Magnesium Sulfate MgSO4 | 1.00 | 0.50 | | 0.50 | |
| Magnesium Chloride MgCl2 | | | 1.00 | | 0.70 |
| Vitamin E Acetate | 0.50 | | 0.25 | | 1.00 |
| Ascorbyl Palmitate | 0.50 | | | 2.00 | |
| Biosaccaride Gum-1 | | | | 3.50 | 1.00 |
| DMDM Hydantoin | | 0.60 | 0.40 | 0.20 | |
| Methylparaben | 0.50 | | 0.25 | 0.15 | |
| Phenoxyethanol | 0.50 | 0.40 | | 1.00 | |
| Trisodium EDTA | 0.12 | 0.05 | | 0.30 | |
| Ethanol | 3.00 | | 1.50 | | 5.00 |
| Perfume oil | 0.20 | | 0.40 | 0.35 | |
| Aqua dem. | ad 100 | ad 100 | ad 100 | ad 100 | ad 100 |

Sticks

| | 1 | 2 | 3 | 4 |
|---|---|---|---|---|
| Caprylic/Capric Triglyceride | 12.00 | 10.00 | 6.00 | |
| Octyldodecanol | 7.00 | 14.00 | 8.00 | 3.00 |
| Butylene Glycol Dicaprylate/ | | | | 12.00 |
| Dicaprate | | | | |
| Pentaerythrityl Tetraisostearate | 10.00 | 6.00 | 8.00 | 7.00 |
| Polyglyceryl-3 Diisostearate | 2.50 | | | |
| Bis-Diglyceryl Polyacyladipate-2 | 9.00 | 8.00 | 10.00 | 8.00 |
| Cetearyl Alcohol | 8.00 | 11.00 | 9.00 | 7.00 |
| Myristyl Myristate | 3.50 | 3.00 | 4.00 | 3.00 |
| Beeswax | 5.00 | 5.00 | 6.00 | 6.00 |
| Copernicia Cerifera (Carnauba) | 1.50 | 2.00 | 2.00 | 1.50 |
| Wax | | | | |
| Cera Alba | 0.50 | 0.50 | 0.50 | 0.40 |
| C16-40 Alkyl Stearate | | 1.50 | 1.50 | 1.50 |
| Fusion protein-KBD | 0.5 | 3.0 | 1.0 | 5.0 |
| Uvinul ® A Plus ™ | 2.00 | 1.50 | 0.75 | 9.00 |
| UvaSorb ® k2A | | 2.00 | | 4.00 |
| Ethylhexyl Bis- | | | | |
| Isopentylbenzoxazolylphenyl | | | | |
| Melamine | | | | |
| Ethylhexyl Methoxycinnamate | | 3.00 | | |
| Uvinul ® MC 80 | | | | |
| Bis-Ethylhexyloxyphenol | | 1.50 | | 2.00 |
| Methoxyphenyl Triazine | | | | |
| Butyl Methoxydibenzoylmethane | | | 2.00 | |
| Disodium Phenyl Dibenzimidazole | 2.50 | | 0.50 | 2.00 |
| Tetrasulfonate | | | | |
| Ethylhexyl Triazone | 4.00 | | 3.00 | 4.00 |
| Uvinul ® T 150 | | | | |
| Octocrylene | | 4.00 | | |
| Diethylhexyl Butamido Triazone | 1.00 | | | 2.00 |
| Phenylbenzimidazole Sulfonic | 0.50 | | 3.00 | |
| Acid | | | | |
| Methylene Bis-Benzotriazolyl | 2.00 | | 0.50 | 1.50 |
| Tetramethylbutylphenol | | | | |
| Ethylhexyl Salicylate | | | 3.00 | |
| Drometrizole Trisiloxane | | | 0.50 | |
| Terephthalidene Dicamphor | | 1.50 | | 1.00 |
| Sulfonic Acid | | | | |
| Diethylhexyl 2,6-Naphthalate | | | 7.00 | |
| Titanium Dioxide-microfine | 1.00 | | 3.00 | |
| Zinc Oxide-microfine | | | | 0.25 |
| Vitamin E Acetate | 0.50 | 1.00 | | |
| Ascorbyl Palmitate | 0.05 | | 0.05 | |
| Buxux Chinensis (Jojoba) Oil | 2.00 | 1.00 | | 1.00 |
| Perfume oil, BHT | 0.10 | 0.25 | | 0.35 |
| Ricinus Communis (Castor) Oil | ad 100 | ad 100 | ad 100 | ad 100 |

PIT emulsion

| | 1 | 2 | 3 | 4 | 5 | 6 | 7 | 8 |
|---|---|---|---|---|---|---|---|---|
| Glyceryl Monostearate SE | 0.50 | 2.00 | 3.00 | 5.00 | | 0.50 | 4.00 | |
| Glyceryl Isostearate | | | | | 3.50 | 4.00 | 2.00 | |
| Isoceteth-20 | | 0.50 | | | 2.00 | | | |
| Ceteareth-12 | | 5.00 | | 1.00 | | | 3.50 | 5.00 |
| Ceteareth-20 | | 5.00 | | 1.00 | | | | 3.50 |
| PEG-100 Stearate | | | | 2.80 | | 2.30 | 3.30 | |
| Cetyl Alcohol | 5.20 | | 1.20 | 1.00 | 1.30 | | 0.50 | 0.30 |
| Cetyl Palmitate | 2.50 | 1.20 | | 1.50 | | 0.50 | | 1.50 |
| Cetyl Dimethicone | | | | 0.50 | | 1.00 | | |
| Copolyol | | | | | | | | |
| Polyglyceryl-2 Dioleate | | | | 0.75 | 0.30 | | | |
| Fusion protein-KBD | 0.1 | 5.0 | 20.0 | 0.5 | 3.0 | 0.25 | 10.0 | 3.0 |
| Uvinul ® A Plus ™ | 2.00 | 1.50 | 0.75 | 1.00 | 2.10 | 4.50 | 5.00 | 2.10 |
| UvaSorb ® k2A | | | 4.00 | | | | 1.50 | |
| Ethylhexyl Bis- | | | | | | | | |
| Isopentylbenzoxazolyl- | | | | | | | | |
| phenyl Melamine | | | | | | | | |
| Ethylhexyl | | | | | 5.00 | 6.00 | 8.00 | 5.00 |
| Methoxycinnamate | | | | | | | | |
| Uvinul ® MC 80 | | | | | | | | |
| Bis-Ethylhexyloxyphenol | | 1.50 | | 2.00 | 2.50 | | 2.50 | 2.50 |
| Methoxyphenyl Triazine | | | | | | | | |
| Butyl Methoxydibenzoyl- | | | 2.00 | | 2.00 | 1.50 | | 2.00 |
| methane | | | | | | | | |
| Disodium Phenyl | 2.50 | | 0.50 | 2.00 | | 0.30 | | |
| Dibenzimidazole | | | | | | | | |
| Tetrasulfonate | | | | | | | | |
| Ethylhexyl Triazone | 4.00 | | 3.00 | 4.00 | | 2.00 | | |
| Uvinul ® T 150 | | | | | | | | |
| Octocrylene | | 4.00 | | | | | 7.50 | |
| Diethylhexyl Butamido | 1.00 | | | 2.00 | 1.00 | | 1.00 | 1.00 |
| Triazone | | | | | | | | |
| Phenylbenzimidazole | 0.50 | | 3.00 | | | | | |
| Sulfonic Acid | | | | | | | | |
| Methylene Bis- | 2.00 | | 0.50 | 1.50 | 2.50 | | | 2.50 |
| Benzotriazolyl | | | | | | | | |
| Tetramethylbutylphenol | | | | | | | | |
| Ethylhexyl Salicylate | | | 3.00 | | | | 5.00 | |
| Drometrizole Trisiloxane | | | 0.50 | | | 1.00 | | |
| Terephthalylidene | | 1.50 | | 1.00 | 1.00 | | 0.50 | 1.00 |
| Dicamphor Sulfonic Acid | | | | | | | | |
| Diethylhexyl 2,6- | | | 7.00 | | 10.00 | 7.50 | | 8.00 |
| Naphthalate | | | | | | | | |
| Titanium | 1.00 | | 3.00 | | 3.50 | | 1.50 | 3.50 |
| Dioxide-microfine | | | | | | | | |
| Zinc Oxide-microfine | | | | 0.25 | | 2.00 | | |
| C12-15 Alkyl Benzoate | 3.50 | | | 6.35 | | | | 0.10 |
| Cocoglyceride | | 3.00 | | 3.00 | | | | 1.00 |
| Dicapryl Ether | 4.50 | | | | | | | |
| Dicaprylyl Carbonate | | 4.30 | | 3.00 | | | | 7.00 |
| Dibutyl Adipate | | | | 0.50 | | | | 0.30 |
| Phenyl Trimethicone | 2.00 | | | 3.50 | | 2.00 | | |
| Cyclomethicone | | 3.00 | | | | | | |
| C1-5 Alkyl | | 0.50 | | | 2.00 | | | |
| Galactomannan | | | | | | | | |
| Hydrogenated Coco- | | | | | 3.00 | 4.00 | | |
| Glycerides | | | | | | | | |
| Behenoxy Dimethicone | | | | | | 1.50 | 2.00 | |
| VP/Hexadecene | | | | 1.00 | 1.20 | | | |
| Copolymer | | | | | | | | |
| Glycerin | 4.00 | 6.00 | 5.00 | | 8.00 | 10.00 | | |
| Vitamin E Acetate | 0.20 | 0.30 | 0.40 | | 0.30 | | | |
| Butyrospermum Parkii | | 2.00 | | 3.60 | | 2.00 | | |
| (Shea Butter) | | | | | | | | |
| Iodopropyl | 0.12 | | | | 0.20 | | | |
| Butylcarbamate | | | | | | | | |
| Biosaccaride Gum-1 | | | | 0.10 | | | | |
| DMDM Hydantoin | 0.10 | | | | 0.12 | | 0.13 | |
| Methylparaben | | 0.50 | 0.30 | | 0.35 | | | |
| Phenoxyethanol | 0.50 | 0.40 | | 1.00 | | | | |
| Ethylhexylglycerin | | 0.30 | | | 1.00 | | 0.35 | |
| Ethanol | 2.00 | | 2.00 | | | 5.00 | | |
| Trisodium EDTA | 0.40 | | 0.15 | | | 0.20 | | |
| Perfume oil | 0.20 | | 0.20 | | 0.24 | 0.16 | 0.10 | 0.10 |
| Aqua dem. | ad 100 | ad 100 | ad 100 | ad 100 | ad 100 | ad 100 | ad 100 | ad 100 |

Gel cream

| | 1 | 2 | 3 | 4 |
|---|---|---|---|---|
| Acrylates/C10-30 Alkylacrylate | 0.40 | 0.35 | 0.40 | 0.35 |
| Crosspolymer | | | | |
| Carbomer | 0.20 | 0.22 | 0.20 | 0.22 |
| Luvigel ® EM | 1.50 | 2.50 | 2.80 | 3.50 |
| Xanthan Gum | 0.10 | 0.13 | 0.10 | 0.13 |
| Cetearyl Alcohol | 3.00 | 2.50 | 3.00 | 2.50 |
| C12-15 Alkyl Benzoate | 4.00 | 4.50 | 4.00 | 4.50 |
| Caprylic/Capric Triglyceride | 3.00 | 3.50 | 3.00 | 3.50 |
| Titanium Dioxide-microfine | 1.00 | | 1.50 | |
| Zinc Oxide-microfine | | 2.00 | | 0.25 |
| Fusion protein-KBD | 0.5 | 10.0 | 3.0 | 5.0 |
| Dihydroxyacetone | | | 3.00 | 5.00 |
| Cyclomethicone | 5.00 | 5.50 | 5.00 | 5.50 |
| Dimethicone | 1.00 | 0.60 | 1.00 | 0.60 |
| Glycerin | 1.00 | 1.20 | 1.00 | 1.20 |
| Sodium Hydroxide | q.s. | q.s. | q.s. | q.s. |
| Preservative | 0.30 | 0.23 | 0.30 | 0.23 |
| Perfume oil | 0.20 | | 0.20 | |
| Aqua dem. | ad 100 | ad 100 | ad 100 | ad 100 |
| adjust pH to 6.0 | | | | |

OW self-tanning formulation

| | 1 | 2 | 3 | 4 | 5 | 6 | 7 |
|---|---|---|---|---|---|---|---|
| Glyceryl Monostearate SE | 0.50 | 1.00 | 3.00 | | | 1.50 | |
| Glyceryl Stearate Citrate | 2.00 | | 1.00 | 2.00 | 4.00 | | |
| Stearic Acid | | 3.00 | | 2.00 | | | |
| PEG-40 Stearate | 0.50 | | | | | 2.00 | |
| Cetyl Phosphate | | | | | | 1.00 | |
| Cetearyl Sulfate | | | | | | | 0.75 |
| Stearyl Alcohol | | | 3.00 | | | 2.00 | 0.60 |
| Cetyl Alcohol | 2.50 | 1.10 | | 1.50 | 0.60 | | 2.00 |
| Fusion protein-KBD | 0.1 | 0.5 | 0.025 | 5.0 | 3.0 | 10.0 | 1.0 |
| Dihydroxyacetone | | | 3.00 | 5.00 | | 4 | |
| Titanium Dioxide-microfine | 1.00 | | | | 1.50 | | 1.50 |
| Zinc Oxide-microfine | | | | 0.25 | | 2.00 | |
| C12-15 Alkyl Benzoate | | 0.25 | | | 4.00 | 7.00 | |
| Dicapryl Ether | | | 3.50 | | 2.00 | | |
| Butylene Glycol | 5.00 | | 6.00 | | | | |
| Dicaprylate/Dicaprate | | | | | | | |
| Cocoglycerides | | | 6.00 | | 2.00 | | |
| Dimethicone | 0.50 | | 1.00 | | 2.00 | | |
| Cyclomethicone | 2.00 | | 0.50 | | 0.50 | | |
| Butyrospermum Parkii (Shea | | 2.00 | | | | | |
| Butter) | | | | | | | |
| VP/Hexadecene Copolymer | 0.20 | | | 0.50 | | 1.00 | |
| Glycerin | 3.00 | 7.50 | | 7.50 | 5.00 | | 2.50 |
| Xanthan Gum | 0.15 | | 0.05 | | | 0.30 | |
| Sodium Carbomer | | 0.20 | | 0.15 | 0.25 | | |
| Vitamin E Acetate | 0.60 | | 0.23 | | 0.70 | 1.00 | |
| Biosaccaride Gum-1 | | 3.00 | 10.00 | | | | |
| Glycine Soya (Soybean) Oil | | | | 0.50 | | 1.50 | 1.00 |
| Ethylhexylglycerin | 0.30 | | | | | | |
| DMDM Hydantoin | | 0.60 | 0.40 | 0.20 | | | |
| Iodopropynyl Butylcarbamate | | | | 0.18 | 0.20 | | |
| Methylparaben | 0.15 | | 0.25 | | 0.50 | | |
| Phenoxyethanol | 1.00 | 0.40 | | | 0.40 | 0.50 | 0.40 |
| Trisodium EDTA | 0.02 | | 0.05 | | | | |
| Tetrasodium | | | | 0.25 | 1.00 | | |
| Iminodisuccinate | | | | | | | |
| Ethanol | 2.00 | 1.50 | | 3.00 | | 1.20 | 5.00 |
| Perfume oil | 0.10 | 0.25 | 0.30 | | 0.40 | 0.20 | |
| Aqua dem. | ad 100 | ad 100 | ad 100 | ad 100 | ad 100 | ad 100 | ad 100 |

OW make-up

| | 1 | 2 | 3 | 4 | 5 | 6 | 7 |
|---|---|---|---|---|---|---|---|
| Glyceryl Monostearate SE | 0.50 | 1.00 | 3.00 | | | 1.50 | |
| Glyceryl Stearate Citrate | 2.00 | | 1.00 | 2.00 | 4.00 | | |
| Stearic Acid | | 3.00 | | 2.00 | | | |
| PEG-40 Stearate | 0.50 | | | | | 2.00 | |
| Cetyl Phosphate | | | | | | 1.00 | |
| Cetearyl Sulfate | | | | | | | 0.75 |
| Stearyl Alcohol | | | 3.00 | | | 2.00 | 0.60 |
| Cetyl Alcohol | 2.50 | 1.10 | | 1.50 | 0.60 | | 2.00 |
| Fusion protein-KBD | 3.0 | 5.0 | 2.0 | 0.5 | 1.0 | 5.0 | 10.0 |
| Titanium Dioxide | 10.00 | 12.00 | 9.00 | 8.50 | 11.00 | 9.50 | 10.00 |
| Iron Oxide | 2.00 | 4.00 | 3.00 | 5.00 | 3.40 | 6.00 | 4.40 |
| Zinc Oxide | | 4.00 | | 2.00 | | 3.00 | |
| C12-15 Alkyl Benzoate | | 0.25 | | | 4.00 | 7.00 | |
| Dicapryl Ether | | | 3.50 | | 2.00 | | |
| Butylene Glycol | 5.00 | | 6.00 | | | | |
| Dicaprylate/Dicaprate | | | | | | | |
| Cocoglycerides | | | 6.00 | | 2.00 | | |
| Dimethicone | 0.50 | | 1.00 | | 2.00 | | |
| Cyclomethicone | 2.00 | | 0.50 | | 0.50 | | |
| Butyrospermum Parkii (Shea | | 2.00 | | | | | |
| Butter) | | | | | | | |
| VP/Hexadecene Copolymer | 0.20 | | | 0.50 | | 1.00 | |
| Glycerin | 3.00 | 7.50 | | 7.50 | 5.00 | | 2.50 |
| Xanthan Gum | 0.15 | | 0.05 | | | 0.30 | |
| Sodium Carbomer | | 0.20 | | 0.15 | 0.25 | | |
| Vitamin E Acetate | 0.60 | | 0.23 | | 0.70 | 1.00 | |
| Glycine Soya (Soybean) Oil | | | | 0.50 | | 1.50 | 1.00 |
| Ethylhexylglycerin | 0.30 | | | | | | |
| DMDM Hydantoin | | 0.60 | 0.40 | 0.20 | | | |
| Iodopropynyl Butylcarbamate | | | | 0.18 | 0.20 | | |
| Methylparaben | 0.15 | | 0.25 | | 0.50 | | |
| Phenoxyethanol | 1.00 | 0.40 | | | 0.40 | 0.50 | 0.40 |
| Trisodium EDTA | 0.02 | | 0.05 | | | | |
| Tetrasodium | | | | 0.25 | 1.00 | | |
| Iminodisuccinate | | | | | | | |
| Ethanol | 2.00 | 1.50 | | 3.00 | | 1.20 | 5.00 |
| Perfume oil | 0.10 | 0.25 | 0.30 | | 0.40 | 0.20 | |
| Aqua dem. | ad 100 | ad 100 | ad 100 | ad 100 | ad 100 | ad 100 | ad 100 |

Self-tanning hydrodispersion

| | 1 | 2 | 3 | 4 | 5 |
|---|---|---|---|---|---|
| Ceteareth-20 | 1.00 | | | 0.50 | |
| Cetyl Alcohol | | | 1.00 | | |
| Luvigel ® EM | | 2.00 | | 2.50 | 2.00 |
| Acrylates/C10-30 Alkyl Acrylate | 0.50 | | 0.40 | 0.10 | 0.50 |
| Crosspolymer | | | | | |
| Xanthan Gum | | 0.30 | 0.15 | | |
| Fusion protein-KBD | 3.0 | 1.0 | 0.5 | 0.1 | 5.0 |
| Dihydroxyacetone | | | 3.00 | 5.00 | |
| Uvinul ® A Plus ™ | 2.00 | 1.50 | 0.75 | 1.00 | 2.10 |
| Titanium Dioxide-microfine | 1.00 | | 1.00 | | 1.00 |
| Zinc Oxide-microfine | | 1.90 | | 0.25 | |
| C12-15 Alkyl Benzoate | 2.00 | 2.50 | | | |
| Dicapryl Ether | | 4.00 | | | |
| Butylene Glycol Dicaprylate/Dicaprate | 4.00 | | 2.00 | 6.00 | |
| Dicapryl Carbonate | | 2.00 | 6.00 | | |
| Dimethicone | | 0.50 | 1.00 | | |
| Phenyl Trimethicone | 2.00 | | 0.50 | | |
| Butyrospermum Parkii (Shea Butter) | | 2.00 | | 5.00 | |
| VP/Hexadecene Copolymer | 0.50 | | | 0.50 | 1.00 |
| Tricontanyl PVP | 0.50 | | 1.00 | | |
| Ethylhexylglycerin | | | 1.00 | | 0.80 |
| Glycerin | 3.00 | 7.50 | | 7.50 | 8.50 |
| Glycine Soya (Soybean) Oil | | | 1.50 | | 1.00 |
| Vitamin E Acetate | 0.50 | | 0.25 | | 1.00 |
| Glucosylrutin | 0.60 | | | 0.25 | |
| DMDM Hydantoin | | 0.60 | 0.45 | 0.25 | |
| Iodopropynyl Butylcarbamate | 0.20 | | | | |
| Methylparaben | 0.50 | | 0.25 | 0.15 | |
| Phenoxyethanol | 0.50 | 0.40 | | 1.00 | |
| Trisodium EDTA | | 0.01 | 0.05 | | 0.10 |
| Ethanol | 3.00 | 2.00 | 1.50 | | 7.00 |
| Perfume oil | 0.20 | | 0.05 | 0.40 | |
| Aqua dem. | ad 100 | ad 100 | ad 100 | ad 100 | ad 100 |

Aftersun hydrodispersion

| | 1 | 2 | 3 | 4 | 5 |
|---|---|---|---|---|---|
| Ceteareth-20 | 1.00 | | | 0.50 | |
| Cetyl Alcohol | | | 1.00 | | |
| Luvigel ® EM | | 2.00 | | 2.50 | 2.00 |
| Acrylates/C10-30 Alkyl | 0.50 | 0.30 | 0.40 | 0.10 | 0.50 |
| Acrylate Crosspolymer | | | | | |
| Xanthan Gum | | 0.30 | 0.15 | | |
| Fusion protein-KBD | 0.1 | 5.0 | 0.5 | 3.0 | 1.0 |
| C12-15 Alkyl Benzoate | 2.00 | 2.50 | | | |
| Dicapryl Ether | | 4.00 | | | |
| Butylene glycol | 4.00 | | 2.00 | 6.00 | |
| Dicaprylate/Dicaprate | | | | | |
| Dicapryl Carbonate | | 2.00 | 6.00 | | |
| Dimethicone | | 0.50 | 1.00 | | |
| Phenyl Trimethicone | 2.00 | | 0.50 | | |
| Tricontanyl PVP | 0.50 | | 1.00 | | |
| Ethylhexylglycerin | | | 1.00 | | 0.80 |
| Glycerin | 3.00 | 7.50 | | 7.50 | 8.50 |
| Glycine Soya (Soybean) | | | 1.50 | | 1.00 |
| Oil | | | | | |
| Vitamin E Acetate | 0.50 | | 0.25 | | 1.00 |
| Glucosylrutin | 0.60 | | | 0.25 | |
| Trisodium EDTA | | 0.01 | 0.05 | | 0.10 |
| Ethanol | 15.00 | 10.00 | 8.00 | 12.00 | 9.00 |
| Perfume oil | 0.20 | | 0.05 | 0.40 | |
| Aqua dem. | ad 100 | ad 100 | ad 100 | ad 100 | ad 100 |

WO emulsions

| | 1 | 2 | 3 | 4 | 5 |
|---|---|---|---|---|---|
| Cetyl Dimethicone | | 2.50 | | 4.00 | |
| Polyglyceryl-2 Dipolyhydroxystearate | 5.00 | | | | 4.50 |
| PEG-30Dipolyhydroxystearate | | | 5.00 | | |
| Fusion protein-KBD | 5.0 | 10.0 | 0.1 | 0.5 | 1.0 |
| Uvinul ® A Plus ™ | 2.00 | 1.50 | 0.75 | 1.00 | 2.10 |
| Titanium Dioxide-microfine | 1.00 | | 3.00 | | 3.50 |
| Zinc Oxide-microfine | | 0.90 | | 0.25 | |
| Mineral Oil | | 12.00 | 10.00 | | 8.00 |
| C12-15 Alkyl Benzoate | | | | 9.00 | |
| Dicaprylyl Ether | 10.00 | | | | 7.00 |
| Butylene Glycol Dicaprylate/Dicaprate | | | 2.00 | 8.00 | 4.00 |
| Dicaprylyl Carbonate | 5.00 | | 6.00 | | |
| Dimethicone | | 4.00 | 1.00 | 5.00 | |
| Cyclomethicone | 2.00 | 25.00 | | | 2.00 |
| Butyrospermum Parkii (Shea Butter) | | | 3.00 | | |
| Petrolatum | | 4.50 | | | |
| VP/Hexadecene Copolymer | 0.50 | | | 0.50 | 1.00 |
| Ethylhexylglycerin | | 0.30 | 1.00 | | 0.50 |
| Glycerin | 3.00 | 7.50 | | 7.50 | 8.50 |
| Glycine Soya (Soybean) Oil | | 1.00 | 1.50 | | 1.00 |
| Magnesium Sulfate | 1.00 | 0.50 | | 0.50 | |
| Magnesium Chloride | | | 1.00 | | 0.70 |
| Vitamin E Acetate | 0.50 | | 0.25 | | 1.00 |
| Ascorbyl Palmitate | 0.50 | | | 2.00 | |
| Biosaccaride Gum-1 | | | | 3.50 | 7.00 |
| DMDM Hydantoin | | 0.60 | 0.40 | 0.20 | |
| Methylparaben | 0.50 | | 0.25 | 0.15 | |
| Phenoxyethanol | 0.50 | 0.40 | | 1.00 | |
| Trisodium EDTA | 0.12 | 0.05 | | 0.30 | |
| Ethanol | 3.00 | | 1.50 | | 5.00 |
| Perfume oil | 0.20 | | 0.40 | 0.35 | |
| Aqua dem. | ad 100 | ad 100 | ad 100 | ad 100 | ad 100 |

Solids-stabilized emulsion
(Pickering emulsions)

| | 1 | 2 | 3 | 4 | 5 |
|---|---|---|---|---|---|
| Mineral Oil | | | 16.00 | 16.00 | |
| Octyldodecanol | 9.00 | 9.00 | 5.00 | | |
| Caprylic/Capric Triglyceride | 9.00 | 9.00 | 6.00 | | |
| C12-15 Alkyl Benzoate | | | | 5.00 | 8.00 |
| Butylene Glycol Dicaprylate/Dicaprate | | | | | 8.00 |
| Dicaprylyl Ether | 9.00 | | | 4.00 | |
| Dicaprylyl Carbonate | | 9.00 | | | |
| Hydroxyoctacosanyl Hydroxystearate | 2.00 | 2.00 | 2.20 | 2.50 | 1.50 |
| Disteardimonium Hectorite | 1.00 | 0.75 | | 0.50 | 0.25 |
| Cera Microcristallina + Paraffinum Liquidum | | 0.35 | | | 5.00 |
| Hydroxypropyl Methylcellulose | | | 0.10 | | 0.05 |
| Dimethicone | | | | | 3.00 |
| Fusion protein-KBD | 1.0 | 0.5 | 0.1 | 3.0 | 5.0 |
| Titanium Dioxide + Alumina + Simethicone + | | 3.00 | | | |
| Aqua | | | | | |
| Titanium Dioxide + Trimethoxycaprylylsilane | | 2.00 | 4.00 | 2.00 | 4.00 |
| Silica Dimethyl Silylate | 2.50 | | | 6.00 | 2.50 |
| Boron Nitride | | | 1.00 | | |
| Starch/Sodium metaphosphate Polymer | 2.00 | | | | |
| Tapioca Starch | | 0.50 | | | |
| Sodium Chloride | 5.00 | 7.00 | 8.50 | 3.00 | 4.50 |
| Glycerin | | | | 1.00 | |
| Trisodium EDTA | 1.00 | 1.00 | 1.00 | 1.00 | 1.00 |
| Vitamin E Acetate | 5.00 | 10.00 | 3.00 | 6.00 | 10.00 |
| Ascorbyl Palmitate | 1.00 | 1.00 | | 1.00 | |
| Methylparaben | | 0.60 | | | 0.20 |
| Propylparaben | | | | | 0.20 |
| Phenoxyethanol | | | 0.20 | | |
| Hexamidine Diisethionate | | | 0.40 | 0.50 | 0.40 |
| Diazolidinyl Urea | | | | | 0.08 |
| Ethanol | | | 0.23 | 0.20 | |
| Perfume oil | 5.00 | | 3.00 | 4.00 | |
| Aqua dem. | 0.20 | | 0.30 | 0.10 | |
| | ad 100 | ad 100 | ad 100 | ad 100 | ad 100 |

Sticks

| | 1 | 2 | 3 | 4 |
|---|---|---|---|---|
| Caprylic/Capric Triglyceride | 12.00 | 10.00 | 6.00 | |
| Octyldodecanol | 7.00 | 14.00 | 8.00 | 3.00 |
| Butylene Glycol Dicaprylate/ | | | | 12.00 |
| Dicaprate | | | | |
| Pentaerythrityl Tetraisostearate | 10.00 | 6.00 | 8.00 | 7.00 |
| Polyglyceryl-3 Diisostearate | 2.50 | | | |
| Bis-Diglyceryl Polyacyladipate-2 | 9.00 | 8.00 | 10.00 | 8.00 |
| Cetearyl Alcohol | 8.00 | 11.00 | 9.00 | 7.00 |
| Myristyl Myristate | 3.50 | 3.00 | 4.00 | 3.00 |
| Beeswax | 5.00 | 5.00 | 6.00 | 6.00 |
| Copernicia Cerifera (Carnauba) | 1.50 | 2.00 | 2.00 | 1.50 |
| Wax | | | | |
| Cera Alba | 0.50 | 0.50 | 0.50 | 0.40 |
| C16-40 Alkyl Stearate | | 1.50 | 1.50 | 1.50 |
| Fusion protein-KBD | 10.0 | 1.0 | 3.0 | 0.1 |
| Uvinul ® A Plus ™ | 2.00 | 1.50 | 0.75 | 9.00 |
| Titanium Dioxide-microfine | 1.00 | | 3.00 | |
| Zinc Oxide-microfine | | 1.00 | | 0.25 |
| Vitamin E Acetate | 0.50 | 1.00 | | |
| Ascorbyl Palmitate | 0.05 | | 0.05 | |
| Buxux Chinensis (Jojoba) Oil | 2.00 | 1.00 | | 1.00 |
| Perfume oil, BHT | 0.10 | 0.25 | | 0.35 |
| Ricinus Communis (Castor) Oil | ad 100 | ad 100 | ad 100 | ad 100 |

Self-tanning PIT emulsions

| | 1 | 2 | 3 | 4 | 5 | 6 | 7 | 8 |
|---|---|---|---|---|---|---|---|---|
| Glyceryl Monostearate SE | 0.50 | 2.00 | 3.00 | 5.00 | | 0.50 | 4.00 | |
| Glyceryl Isostearate | | | | | 3.50 | 4.00 | 2.00 | |
| Isoceteth-20 | | 0.50 | | | 2.00 | | | |
| Ceteareth-12 | | 5.00 | | 1.00 | | | 3.50 | 5.00 |
| Ceteareth-20 | | 5.00 | | 1.00 | | | | 3.50 |
| PEG-100 Stearate | | | | 2.80 | | 2.30 | 3.30 | |
| Cetyl Alcohol | 5.20 | | 1.20 | 1.00 | 1.30 | | 0.50 | 0.30 |
| Cetyl Palmitate | 2.50 | 1.20 | | 1.50 | | 0.50 | | 1.50 |
| Cetyl Dimethicone Copolyol | | | | 0.50 | | 1.00 | | |
| Polyglyceryl-2 | | | | 0.75 | 0.30 | | | |
| Fusion protein-KBD | 0.1 | 0.5 | 0.01 | 5.0 | 0.5 | 3.0 | 0.025 | 10.0 |
| Dihydroxyacetone | | | 3.00 | 5.00 | | | 4.00 | |
| Uvinul ® A Plus ™ | 2.00 | 1.50 | 0.75 | 1.00 | 2.10 | 4.50 | 5.00 | 2.10 |
| Titanium Dioxide-microfine | 1.00 | | 1.50 | | 3.50 | | 1.50 | 1.00 |
| Zinc Oxide-microfine | | 1.00 | | 0.25 | | 2.00 | | 1.50 |
| C12-15 Alkyl Benzoate | 3.50 | | | 6.35 | | | | 0.10 |
| Cocoglycerides | | 3.00 | | 3.00 | | | | 1.00 |
| Dicapryl Ether | 4.50 | | | | | | | |
| Dicaprylyl Carbonate | | 4.30 | | 3.00 | | | | 7.00 |
| Dibutyl Adipate | | | | 0.50 | | | | 0.30 |
| Phenyl Trimethicone | 2.00 | | | 3.50 | | 2.00 | | |
| Cyclomethicone | | 3.00 | | | | | | |
| C1-5 Alkyl Galactomannan | | 0.50 | | | 2.00 | | | |
| Hydrogenated Coco-Glycerides | | | | | 3.00 | 4.00 | | |
| Behenoxy Dimethicone | | | | | | 1.50 | 2.00 | |
| VP/Hexadecene Copolymer | | | | 1.00 | 1.20 | | | |
| Glycerin | 4.00 | 6.00 | 5.00 | | 8.00 | 10.00 | | |
| Vitamin E Acetate | 0.20 | 0.30 | 0.40 | | 0.30 | | | |
| Butyrospermum Parkii (Shea | | 2.00 | | 3.60 | | 2.00 | | |
| Butter) | | | | | | | | |
| Iodopropyl Butylcarbamate | 0.12 | | | | 0.20 | | | |
| DMDM Hydantoin | 0.10 | | | | 0.12 | | 0.13 | |
| Methylparaben | | 0.50 | 0.30 | | 0.35 | | | |
| Phenoxyethanol | 0.50 | 0.40 | | 1.00 | | | | |
| Ethylhexylglycerin | | 0.30 | | | 1.00 | | 0.35 | |
| Ethanol | 2.00 | | 2.00 | | | 5.00 | | |
| Trisodium EDTA | 0.40 | | 0.15 | | | 0.20 | | |
| Perfume oil | 0.20 | | 0.20 | | 0.24 | 0.16 | 0.10 | 0.10 |
| Aqua dem. | ad 100 | ad 100 | ad 100 | ad 100 | ad 100 | ad 100 | ad 100 | ad 100 |

Oil gel

| | 1 | 2 | 3 | 4 |
|---|---|---|---|---|
| Caprylic/Capric Triglyceride | 12.00 | 10.00 | 6.00 | |
| Octyldodecanol | 7.00 | 14.00 | 8.00 | 3.00 |
| Butylene Glycol | | | | 12.00 |
| Dicaprylate/Dicaprate | | | | |
| Pentaerythrityl Tetraisostearate | 10.00 | 6.00 | 8.00 | 7.00 |
| Polyglyceryl-3 Diisostearate | 2.50 | | | |
| Bis-Diglyceryl Polyacyladipate-2 | 9.00 | 8.00 | 10.00 | 8.00 |
| Myristyl Myristate | 3.50 | 3.00 | 4.00 | 3.00 |
| Quaternium-18 Bentonite | 5.00 | 5.00 | 6.00 | 6.00 |
| Propylene Carbonate | 15.00 | 20.00 | 18.00 | 19.50 |
| Fusion protein-KBD | 1.0 | 0.5 | 3.0 | 5.0 |
| Vitamin E Acetate | 0.50 | 1.00 | | |
| Ascorbyl Palmitate | 0.05 | | 0.05 | |
| Buxus Chinensis (Jojoba) Oil | 2.00 | 1.00 | | 1.00 |
| Perfume oil, BHT | 0.10 | 0.25 | | 0.35 |
| Ricinus Communis (Castor) Oil | ad 100 | ad 100 | ad 100 | ad 100 |

### Example 72

[0847] In the formulations below, cosmetic sunscreen preparations comprising a combination of at least one inorganic pigment, preferably zinc oxide and/or titanium dioxide and organic UV-A and UV-B filters are described.

[0848] The formulations specified below are prepared in customary ways known to the person skilled in the art.

[0849] The content of keratin-binding effector molecule C16-KBD-D (according to SEQ ID No.: 212 in pRee024 (FIG. 8)) prepared according to Example 3 refers to 100% of active ingredient. The active ingredient according to the invention can either be used in pure form or else in the form of an aqueous solution. In the case of the aqueous solution, the content of Water demin. in the particular formulation must be adjusted.

| | | | |
|---|---|---|---|
| A | 7.50 | Uvinul MC 80 | Ethylhexyl Cinnamate |
| | 2.00 | Uvinul M 40 | Benzophenone-3 |
| | 0.80 | Rylo PG 11 | Polyglyceryl Dimer Soyate |
| | 1.00 | Span 60 | Sorbitan Stearate |
| | 0.50 | Vitamin E acetate | Tocopheryl Acetate |
| | 3.00 | Dracorin 100 SE | Glyceryl Stearate, PEG-100 Stearate |
| | 1.00 | Cremophor CO 410 | PEG-40 Hydrogenated Castor Oil |
| B | 3.00 | T-Lite SF | Titanium Dioxide, Alumina Hydrate, |
| | | | Dimethicone/Methicone Copolymer |
| | 1.00 | Cetiol SB 45 | Butyrospermum Parkii (Shea Butter) |
| | 6.50 | Finsolv TN | C12-15 Alkyl Benzoate |
| C | 5.00 | Butylene Glycol | Butylene Glycol |
| | 0.30 | Keltrol | Xanthan Gum |
| | 0.10 | Edeta BD | Disodium EDTA |
| | 0.10 | Allantoin | Allantoin |
| | 66.20 | Water demin. | Aqua dem. |
| D | 1.00 | Sepigel 305 | Polyacrylamide, C13-14 Isoparaffin, |
| | | | Laureth-7 |
| | 1% | Fusion protein-KBD | |
| | q.s. | | Preservative |

| | | | |
|---|---|---|---|
| A | 7.50 | Uvinul MC 80 | Ethylhexyl Cinnamate |
| | 2.00 | Uvinul M 40 | Benzophenone-3 |
| | 0.80 | Rylo PG 11 | Polyglyceryl Dimer Soyate |
| | 1.00 | Span 60 | Sorbitan Stearate |
| | 0.50 | Vitamin E acetate | Tocopheryl Acetate |
| | 3.00 | Dracorin 100 SE | Glyceryl Stearate, PEG-100 Stearate |
| | 1.00 | Cremophor CO 410 | PEG-40 Hydrogenated Castor Oil |
| B | 3.00 | Z-COTE MAX | Zinc Oxide (and) Diphenyl |
| | | | Capryl Methicone |
| | 1.00 | Cetiol SB 45 | Butyrospermum Parkii (Shea Butter) |
| | 6.50 | Finsolv TN | C12-15 Alkyl Benzoate |
| C | 5.00 | Butylene Glycol | Butylene Glycol |
| | 0.30 | Keltrol | Xanthan Gum |
| | 0.10 | Edeta BD | Disodium EDTA |
| | 0.10 | Allantoin | Allantoin |
| | 66.20 | Water demin. | Aqua dem. |
| D | 2.00 | Simulgel NS | Hydroxyethyl Acrylate/Sodium |
| | | | Acryloyldimethyl Taurate Copolymer, |
| | | | Squalane, Polysorbate 60 |
| | 1% | Fusion protein-KBD | |
| | q.s. | | Preservative |

| | | | |
|---|---|---|---|
| A | 7.50 | Uvinul MC 80 | Ethylhexyl Cinnamate |
| | 2.00 | Uvinul A Plus | Diethylamino Hydroxybenzoyl |
| | | | Hexyl Benzoate |
| | 0.80 | Rylo PG 11 | Polyglyceryl Dimer Soyate |
| | 1.00 | Span 60 | Sorbitan Stearate |
| | 0.50 | Vitamin E acetate | Tocopheryl Acetate |
| | 3.00 | Dracorin 100 SE | Glyceryl Stearate, PEG-100 Stearate |
| | 1.00 | Cremophor CO 410 | PEG-40 Hydrogenated Castor Oil |
| B | 3.00 | Z-COTE MAX | Zinc Oxide (and) |
| | | | Diphenyl Capryl Methicone |
| | 1.00 | Cetiol SB 45 | Butyrospermum Parkii (Shea Butter) |
| | 6.50 | Finsolv TN | C12-15 Alkyl Benzoate |
| C | 5.00 | Butylene Glycol | Butylene Glycol |
| | 0.30 | Keltrol | Xanthan Gum |
| | 0.10 | Edeta BD | Disodium EDTA |
| | 0.10 | Allantoin | Allantoin |
| | 66.20 | Water demin. | Aqua dem. |
| D | 2.00 | Simulgel NS | Hydroxyethyl Acrylate/ |
| | | | Sodium Acryloyldimethyl Taurate |
| | | | Copolymer, Squalane, Polysorbate 60 |
| | 1% | Fusion protein-KBD | |
| | q.s. | | Preservative |

| | | | |
|---|---|---|---|
| A | 4.00 | Uvinul MC 80 | Ethylhexyl Cinnamate |
| | 2.00 | Uvinul T 150 | Ethyl Hexyl Triazone |
| | 2.00 | Uvinul A Plus | Diethylamino Hydroxybenzoyl |
| | | | Hexyl Benzoate |
| | 0.80 | Rylo PG 11 | Polyglyceryl Dimer Soyate |
| | 1.00 | Span 60 | Sorbitan Stearate |
| | 0.50 | Vitamin E acetate | Tocopheryl Acetate |
| | 3.00 | Dracorin 100 SE | Glyceryl Stearate, PEG-100 Stearate |
| | 1.00 | Cremophor CO 410 | PEG-40 Hydrogenated Castor Oil |
| B | 3.00 | Z-COTE MAX | Zinc Oxide (and) |
| | | | Diphenyl Capryl Methicone |
| | 1.00 | Cetiol SB 45 | Butyrospermum Parkii (Shea Butter) |
| | 6.50 | Finsolv TN | C12-15 Alkyl Benzoate |
| C | 5.00 | Butylene Glycol | Butylene Glycol |
| | 0.30 | Keltrol | Xanthan Gum |
| | 0.10 | Edeta BD | Disodium EDTA |
| | 0.10 | Allantoin | Allantoin |
| | 66.20 | Water demin. | Aqua dem. |
| D | 2.00 | Simulgel NS | Hydroxyethyl Acrylate/ |
| | | | Sodium Acryloyldimethyl Taurate |
| | | | Copolymer, Squalane, Polysorbate 60 |
| | 1% | Fusion protein-KBD | |
| | q.s. | | Preservative |

| | | | |
|---|---|---|---|
| A | 4.00 | Uvinul MC 80 | Ethylhexyl Cinnamate |
| | 2.00 | Uvinul T 150 | Ethyl Hexyl Triazone |
| | 2.00 | Uvinul A Plus | Diethylamino Hydroxybenzoyl |
| | | | Hexyl Benzoate |
| | 0.80 | Rylo PG 11 | Polyglyceryl Dimer Soyate |
| | 1.00 | Span 60 | Sorbitan Stearate |
| | 0.50 | Vitamin E acetate | Tocopheryl Acetate |
| | 3.00 | Dracorin 100 SE | Glyceryl Stearate, PEG-100 Stearate |
| | 1.00 | Cremophor CO 410 | PEG-40 Hydrogenated Castor Oil |
| B | 3.00 | T-Lite SF | Titanium Dioxide, Alumina Hydrate, |
| | | | Dimethicone/Methicone Copolymer |
| | 1.00 | Cetiol SB 45 | Butyrospermum Parkii (Shea Butter) |
| | 6.50 | Finsolv TN | C12-15 Alkyl Benzoate |
| C | 5.00 | Butylene Glycol | Butylene Glycol |
| | 0.30 | Keltrol | Xanthan Gum |
| | 0.10 | Edeta BD | Disodium EDTA |
| | 0.10 | Allantoin | Allantoin |
| | 66.20 | Water demin. | Aqua dem. |
| D | 2.00 | Simulgel NS | Hydroxyethyl Acrylate/ |
| | | | Sodium Acryloyldimethyl Taurate |
| | | | Copolymer, Squalane, Polysorbate 60 |
| | 1% | Fusion protein-KBD | |
| | q.s. | | Preservative |

| | | | |
|---|---|---|---|
| A | 4.00 | Uvinul MC 80 | Ethylhexyl Cinnamate |
| | 2.00 | Uvinul T 150 | Ethyl Hexyl Triazone |
| | 2.00 | Uvinul A Plus | Diethylamino Hydroxybenzoyl |
| | | | Hexyl Benzoate |
| | 0.80 | Rylo PG 11 | Polyglyceryl Dimer Soyate |
| | 1.00 | Span 60 | Sorbitan Stearate |
| | 0.50 | Vitamin E acetate | Tocopheryl Acetate |
| | 3.00 | Dracorin 100 SE | Glyceryl Stearate, PEG-100 Stearate |
| | 1.00 | Cremophor CO 410 | PEG-40 Hydrogenated Castor Oil |
| B | 3.00 | Z-COTE MAX | Zinc Oxide (and) Diphenyl Capryl |
| | | | Methicone |
| | 1.00 | Cetiol SB 45 | Butyrospermum Parkii (Shea Butter) |
| | 6.50 | Finsolv TN | C12-15 Alkyl Benzoate |
| C | 5.00 | Butylene Glycol | Butylene Glycol |
| | 0.30 | Keltrol | Xanthan Gum |
| | 0.10 | Edeta BD | Disodium EDTA |
| | 0.10 | Allantoin | Allantoin |
| | 66.20 | Water demin. | Aqua dem. |
| D | 2.00 | Simulgel NS | Hydroxyethyl Acrylate/Sodium |
| | | | Acryloyldimethyl Taurate Copolymer, |
| | | | Squalane, Polysorbate 60 |
| | 1% | Fusion protein-KBD | |
| | q.s. | | Preservative |

| | | | |
|---|---|---|---|
| A | 4.00 | Uvinul MC 80 | Ethylhexyl Cinnamate |
| | 1.00 | Uvinul T 150 | Ethyl Hexyl Triazone |
| | 2.00 | Parsol 1789 | Butyl Methoxydibenzoylmethane |
| | 0.80 | Rylo PG 11 | Polyglyceryl Dimer Soyate |
| | 1.00 | Span 60 | Sorbitan Stearate |
| | 0.50 | Vitamin E acetate | Tocopheryl Acetate |
| | 3.00 | Dracorin 100 SE | Glyceryl Stearate, PEG-100 Stearate |
| | 1.00 | Cremophor CO 410 | PEG-40 Hydrogenated Castor Oil |
| B | 3.00 | T-Lite SF-S | Titanium Dioxide, Silica Hydrate, |
| | | | Alumina Hydrate, Methicone/ |
| | | | Dimethicone Copolymer |
| | 1.00 | Cetiol SB 45 | Butyrospermum Parkii (Shea Butter) |
| | 6.50 | Finsolv TN | C12-15 Alkyl Benzoate |
| C | 5.00 | Butylene Glycol | Butylene Glycol |
| | 0.30 | Keltrol | Xanthan Gum |
| | 0.10 | Edeta BD | Disodium EDTA |
| | 0.10 | Allantoin | Allantoin |
| | 66.70 | Water demin. | Aqua dem. |
| D | 2.00 | Simulgel NS | Hydroxyethyl Acrylate/Sodium |
| | | | Acryloyldimethyl Taurate |
| | | | Copolymer, Squalane, |
| | | | Polysorbate 60 |
| | 0.5% | Fusion protein-KBD | |
| | q.s. | | Preservative |

| | | | |
|---|---|---|---|
| A | 4.00 | Uvinul MC 80 | Ethylhexyl Cinnamate |
| | 1.00 | Uvinul T 150 | Ethyl Hexyl Triazone |
| | 2.00 | Parsol 1789 | Butyl Methoxydibenzoylmethane |
| | 0.80 | Rylo PG 11 | Polyglyceryl Dimer Soyate |
| | 1.00 | Span 60 | Sorbitan Stearate |
| | 0.50 | Vitamin E acetate | Tocopheryl Acetate |
| | 3.00 | Dracorin 100 SE | Glyceryl Stearate, PEG-100 Stearate |
| | 1.00 | Cremophor CO 410 | PEG-40 Hydrogenated Castor Oil |
| B | 3.00 | Z-COTE MAX | Zinc Oxide (and) Diphenyl |
| | | | Capryl Methicone |
| | 1.00 | Cetiol SB 45 | Butyrospermum Parkii (Shea Butter) |
| | 6.50 | Finsolv TN | C12-15 Alkyl Benzoate |
| C | 5.00 | Butylene Glycol | Butylene Glycol |
| | 0.30 | Keltrol | Xanthan Gum |
| | 0.10 | Edeta BD | Disodium EDTA |
| | 0.10 | Allantoin | Allantoin |
| | 67.10 | Water demin. | Aqua dem. |
| D | 2.00 | Simulgel NS | Hydroxyethyl Acrylate/Sodium |
| | | | Acryloyldimethyl Taurate |
| | | | Copolymer, Squalane, |
| | | | Polysorbate 60 |
| | 0.1% | Fusion protein-KBD | |
| | q.s. | | Preservative |

| | | | |
|---|---|---|---|
| A | 5.00 | Uvinul N 539 T | Octocrylene |
| | 2.00 | Parsol 1789 | Butyl Methoxydibenzoylmethane |
| | 0.80 | Rylo PG 11 | Polyglyceryl Dimer Soyate |
| | 1.00 | Span 60 | Sorbitan Stearate |
| | 0.50 | Vitamin E acetate | Tocopheryl Acetate |
| | 3.00 | Dracorin 100 SE | Glyceryl Stearate, PEG-100 Stearate |
| | 1.00 | Cremophor CO 410 | PEG-40 Hydrogenated Castor Oil |
| B | 3.00 | T-Lite SF-S | Titanium Dioxide, Silica Hydrate, |
| | | | Alumina Hydrate, Methicone/ |
| | | | Dimethicone Copolymer |
| | 1.00 | Cetiol SB 45 | Butyrospermum Parkii (Shea Butter) |
| | 6.50 | Finsolv TN | C12-15 Alkyl Benzoate |
| C | 5.00 | Butylene Glycol | Butylene Glycol |
| | 0.30 | Keltrol | Xanthan Gum |
| | 0.10 | Edeta BD | Disodium EDTA |
| | 0.10 | Allantoin | Allantoin |
| | 66.20 | Water demin. | Aqua dem. |
| D | 2.00 | Simulgel NS | Hydroxyethyl Acrylate/Sodium |
| | | | Acryloyldimethyl Taurate Copolymer, |
| | | | Squalane, Polysorbate 60 |
| | 1% | Fusion protein-KBD | |
| | q.s. | | Preservative |

| | | | |
|---|---|---|---|
| A | 5.00 | Uvinul N 539 T | Octocrylene |
| | 2.00 | Uvinul A Plus | Diethylamino Hydroxybenzoyl |
| | | | Hexyl Benzoate |
| | 0.80 | Rylo PG 11 | Polyglyceryl Dimer Soyate |
| | 1.00 | Span 60 | Sorbitan Stearate |
| | 0.50 | Vitamin E acetate | Tocopheryl Acetate |
| | 3.00 | Dracorin 100 SE | Glyceryl Stearate, PEG-100 Stearate |
| | 1.00 | Cremophor CO 410 | PEG-40 Hydrogenated Castor Oil |
| B | 3.00 | T-Lite SF | Titanium Dioxide, Alumina Hydrate, |
| | | | Dimethicone/Methicone Copolymer |
| | 1.00 | Cetiol SB 45 | Butyrospermum Parkii (Shea Butter) |
| | 6.50 | Finsolv TN | C12-15 Alkyl Benzoate |
| C | 5.00 | Butylene Glycol | Butylene Glycol |
| | 0.30 | Keltrol | Xanthan Gum |
| | 0.10 | Edeta BD | Disodium EDTA |
| | 0.10 | Allantoin | Allantoin |
| | 65.20 | Water demin. | Aqua dem. |
| D | 2.00 | Simulgel NS | Hydroxyethyl Acrylate/Sodium |
| | | | Acryloyldimethyl Taurate Copolymer, |
| | | | Squalane, Polysorbate 60 |
| | 2% | Fusion protein-KBD | |
| | q.s. | | Preservative |

| | | | |
|---|---|---|---|
| A | 5.00 | Uvinul N 539 T | Octocrylene |
| | 2.00 | Uvinul A Plus | Diethylamino Hydroxybenzoyl |
| | | | Hexyl Benzoate |
| | 0.80 | Rylo PG 11 | Polyglyceryl Dimer Soyate |
| | 1.00 | Span 60 | Sorbitan Stearate |
| | 0.50 | Vitamin E acetate | Tocopheryl Acetate |
| | 3.00 | Dracorin 100 SE | Glyceryl Stearate, PEG-100 Stearate |
| | 1.00 | Cremophor CO 410 | PEG-40 Hydrogenated Castor Oil |
| B | 3.00 | Z-COTE MAX | Zinc Oxide (and) Diphenyl |
| | | | Capryl Methicone |
| | 1.00 | Cetiol SB 45 | Butyrospermum Parkii (Shea Butter) |
| | 6.50 | Finsolv TN | C12-15 Alkyl Benzoate |
| C | 5.00 | Butylene Glycol | Butylene Glycol |
| | 0.30 | Keltrol | Xanthan Gum |
| | 0.10 | Edeta BD | Disodium EDTA |
| | 0.10 | Allantoin | Allantoin |
| | 66.70 | Water demin. | Aqua dem. |
| D | 2.00 | Simulgel NS | Hydroxyethyl Acrylate/ |
| | | | Sodium Acryloyldimethyl Taurate |
| | | | Copolymer, Squalane, Polysorbate 60 |
| | 0.5% | Fusion protein-KBD | |
| | q.s. | | Preservative |

| | | | |
|---|---|---|---|
| A | 5.00 | Uvinul N 539 T | Octocrylene |
| | 2.00 | Uvinul A Plus | Diethylamino Hydroxybenzoyl |
| | | | Hexyl Benzoate |
| | 0.80 | Rylo PG 11 | Polyglyceryl Dimer Soyate |
| | 1.00 | Span 60 | Sorbitan Stearate |
| | 0.50 | Vitamin E acetate | Tocopheryl Acetate |
| | 3.00 | Dracorin 100 SE | Glyceryl Stearate, PEG-100 Stearate |
| | 1.00 | Cremophor CO 410 | PEG-40 Hydrogenated Castor Oil |
| B | 3.00 | Z-COTE MAX | Zinc Oxide (and) Diphenyl |
| | | | Capryl Methicone |
| | 1.00 | Cetiol SB 45 | Butyrospermum Parkii (Shea Butter) |
| | 6.50 | Finsolv TN | C12-15 Alkyl Benzoate |
| C | 5.00 | Butylene Glycol | Butylene Glycol |
| | 0.30 | Keltrol | Xanthan Gum |
| | 0.10 | Edeta BD | Disodium EDTA |
| | 0.10 | Allantoin | Allantoin |
| | 2.0 | Mexoryl SX | Terephthalidene Dicamphor |
| | | | Sulfonic Acid |
| | 66.20 | Water demin. | Aqua dem. |
| D | 2.00 | Simulgel NS | Hydroxyethyl Acrylate/Sodium |
| | | | Acryloyldimethyl Taurate Copolymer, |
| | | | Squalane, Polysorbate 60 |
| | 1% | Fusion protein-KBD | |
| | q.s. | | Preservative |

| | | | |
|---|---|---|---|
| A | 5.00 | Uvinul N 539 T | Octocrylene |
| | 2.00 | Uvinul A Plus | Diethylamino Hydrobenzoyl |
| | | | Hexyl Benzoate |
| | 0.80 | Rylo PG 11 | Polyglyceryl Dimer Soyate |
| | 1.00 | Span 60 | Sorbitan Stearate |
| | 0.50 | Vitamin E acetate | Tocopheryl Acetate |
| | 3.00 | Dracorin 100 SE | Glyceryl Stearate, PEG-100 Stearate |
| | 1.00 | Cremophor CO 410 | PEG-40 Hydrogenated Castor Oil |
| B | 3.00 | Z-COTE MAX | Zinc Oxide (and) Diphenyl Capryl |
| | | | Methicone |
| | 1.00 | Cetiol SB 45 | Butyrospermum Parkii (Shea Butter) |
| | 6.50 | Finsolv TN | C12-15 Alkyl Benzoate |
| C | 5.00 | Butylene Glycol | Butylene Glycol |
| | 0.30 | Keltrol | Xanthan Gum |
| | 0.10 | Edeta BD | Disodium EDTA |
| | 0.10 | Allantoin | Allantoin |
| | 2.0 | Mexoryl SX | Terephthalidene Dicamphor Sulfonic |
| | | | Acid |
| | 65.20 | Water demin. | Aqua dem. |
| D | 2.00 | Simulgel NS | Hydroxyethyl Acrylate/Sodium |
| | | | Acryloyldimethyl Taurate Copolymer, |
| | | | Squalane, Polysorbate 60 |
| | 2% | Fusion protein-KBD | |
| | q.s. | | Preservative |

| | | | |
|---|---|---|---|
| A | 5.00 | Uvinul N 539 T | Octocrylene |
| | 2.00 | Uvinul A Plus | Diethylamino Hydroxybenzoyl |
| | | | Hexyl Benzoate |
| | 2.00 | Mexoryl XL | Drometrizole Trisiloxane |
| | 0.80 | Rylo PG 11 | Polyglyceryl Dimer Soyate |
| | 1.00 | Span 60 | Sorbitan Stearate |
| | 0.50 | Vitamin E acetate | Tocopheryl Acetate |
| | 3.00 | Dracorin 100 SE | Glyceryl Stearate, PEG-100 Stearate |
| | 1.00 | Cremophor CO 410 | PEG-40 Hydrogenated Castor Oil |
| B | 3.00 | Z-COTE MAX | Zinc Oxide (and) Diphenyl Capryl |
| | | | Methicone |
| | 1.00 | Cetiol SB 45 | Butyrospermum Parkii (Shea Butter) |
| | 6.50 | Finsolv TN | C12-15 Alkyl Benzoate |
| C | 5.00 | Butylene Glycol | Butylene Glycol |
| | 0.30 | Keltrol | Xanthan Gum |
| | 0.10 | Edeta BD | Disodium EDTA |
| | 0.10 | Allantoin | Allantoin |
| | 67.10 | Water demin. | Aqua dem. |
| D | 2.00 | Simulgel NS | Hydroxyethyl Acrylate/Sodium |
| | | | Acryloyldimethyl Taurate |
| | | | Copolymer, Squalane, |
| | | | Polysorbate 60 |
| | 0.1% | Fusion protein-KBD | |
| | q.s. | | Preservative |

| | | | |
|---|---|---|---|
| A | 5.00 | Uvinul N 539 T | Octocrylene |
| | 2.00 | Tinosorb S | Bis-Ethylhexyloxyphenol |
| | | | Methoxyphenyl Triazine |
| | 0.80 | Rylo PG 11 | Polyglyceryl Dimer Soyate |
| | 1.00 | Span 60 | Sorbitan Stearate |
| | 0.50 | Vitamin E acetate | Tocopheryl Acetate |
| | 3.00 | Dracorin 100 SE | Glyceryl Stearate, PEG-100 Stearate |
| | 1.00 | Cremophor CO 410 | PEG-40 Hydrogenated Castor Oil |
| B | 3.00 | Z-COTE MAX | Zinc Oxide (and) Diphenyl |
| | | | Capryl Methicone |
| | 1.00 | Cetiol SB 45 | Butyrospermum Parkii (Shea Butter) |
| | 6.50 | Finsolv TN | C12-15 Alkyl Benzoate |
| C | 5.00 | Butylene Glycol | Butylene Glycol |
| | 0.30 | Keltrol | Xanthan Gum |
| | 0.10 | Edeta BD | Disodium EDTA |
| | 0.10 | Allantoin | Allantoin |
| | 66.20 | Water demin. | Aqua dem. |
| D | 2.00 | Simulgel NS | Hydroxyethyl Acrylate/Sodium |
| | | | Acryloyldimethyl Taurate Copolymer, |
| | | | Squalane, Polysorbate 60 |
| | 1% | Fusion protein-KBD | |
| | q.s. | | Preservative |

| | | | |
|---|---|---|---|
| A | 7.50 | Uvinul MC 80 | Ethylhexyl Methoxycinnamate |
| | 5.00 | Uvinul N 539 T | Octocrylene |
| | 3.00 | Emulgade PL 68/50 | Cetearyl Glucoside, Cetearyl Alcohol |
| | 2.00 | Dracorin 100 SE | Glyceryl Stearate, PEG-100 Stearate |
| | 1.00 | Fitoderm | Squalane |
| | 0.50 | Cremophor WO 7 | PEG-7 Hydrogenated Castor Oil |
| | 0.50 | Cremophor PS 20 | Polysorbate 20 |
| | 2.00 | Dry Flo Pure | Aluminum Starch Octenylsuccinate |
| B | 5.00 | Z-COTE MAX | Zinc Oxide (and) Diphenyl |
| | | | Capryl Methicone |
| C | 4.00 | 1,2-Propylene | Propylene Glycol |
| | | Glycol Care | |
| | 0.20 | Keltrol | Xanthan Gum |
| | 0.50 | Simulgel 600 | Acrylamide/Sodium |
| | | | Acryloyldimethyltaurate Copolymer, |
| | | | Isohexadecane, Polysorbate 80 |
| | ad 100 | Water demin. | Aqua dem. |
| | q.s. | Preservative | |
| | 0.50 | Vitamin E acetate | Tocopheryl Acetate |
| | 2% | Fusion protein-KBD | |
| | 1.00 | RetiSTAR | Caprylic/Capric Triglyceride, Sodium |
| | | | Ascorbate, Tocopherol, Retinol |

| | | | |
|---|---|---|---|
| A | 7.50 | Uvinul MC 80 | Ethylhexyl Methoxycinnamate |
| | 2.00 | Uvinul N 539 T | Octocrylene |
| | 3.00 | Emulgade PL 68/50 | Cetearyl Glucoside, Cetearyl Alcohol |
| | 2.00 | Dracorin 100 SE | Glyceryl Stearate, PEG-100 Stearate |
| | 1.00 | Fitoderm | Squalane |
| | 0.50 | Cremophor WO 7 | PEG-7 Hydrogenated Castor Oil |
| | 0.50 | Cremophor PS 20 | Polysorbate 20 |
| | 2.00 | Dry Flo Pure | Aluminum Starch Octenylsuccinate |
| B | 5.00 | T-Lite SF-S | Titanium Dioxide, Silica |
| | | | Hydrate, Alumina Hydrate, |
| | | | Methicone/Dimethicone Copolymer |
| C | 4.00 | 1,2-Propylene | Propylene Glycol |
| | | Glycol Care | |
| | 0.20 | Keltrol | Xanthan Gum |
| | 0.50 | Simulgel 600 | Acrylamide/Sodium |
| | | | Acryloyldimethyltaurate Copolymer, |
| | | | Isohexadecane, Polysorbate 80 |
| | ad 100 | Water demin. | Aqua dem. |
| | q.s. | Preservative | |
| | 0.50 | Vitamin E acetate | Tocopheryl Acetate |
| | 1% | Fusion protein-KBD | |
| | 2.00 | RetiSTAR | Caprylic/Capric Triglyceride, Sodium |
| | | | Ascorbate, Tocopherol, Retinol |

| | | | |
|---|---|---|---|
| A | 7.50 | Uvinul MC 80 | Ethylhexyl Methoxycinnamate |
| | 5.09 | Uvinul N 539 T | Octocrylene |
| | 3.00 | Emulgade PL 68/50 | Cetearyl Glucoside, Cetearyl Alcohol |
| | 2.00 | Dracorin 100 SE | Glyceryl Stearate, PEG-100 Stearate |
| | 1.00 | Fitoderm | Squalane |
| | 0.50 | Cremophor WO 7 | PEG-7 Hydrogenated Castor Oil |
| | 0.50 | Cremophor PS 20 | Polysorbate 20 |
| | 2.00 | Dry Flo Pure | Aluminum Starch Octenylsuccinate |
| B | 5.00 | T-Lite SF | Titanium Dioxide, Alumina Hydrate, |
| | | | Dimethicone/Methicone Copolymer |
| C | 4.00 | 1,2-Propylene | Propylene Glycol |
| | | Glycol Care | |
| | 1.00 | D-Panthenol 50 P | Panthenol, Propylene Glycol |
| | 0.20 | Keltrol | Xanthan Gum |
| | 0.50 | Simulgel 600 | Acrylamide/Sodium |
| | | | Acryloyldimethyltaurate Copolymer, |
| | | | Isohexadecane, Polysorbate 80 |
| | ad 100 | Water demin. | Aqua dem. |
| | q.s. | Preservative | |
| | 0.50 | Vitamin E acetate | Tocopheryl Acetate |
| | 1% | Fusion protein-KBD | |
| | 1.00 | RetiSTAR | Caprylic/Capric Triglyceride, |
| | | | Sodium Ascorbate, Tocopherol, |
| | | | Retinol |

| | | | |
|---|---|---|---|
| A | 5.50 | Uvinul MC 80 | Ethylhexyl Methoxycinnamate |
| | 2.00 | Uvinul A Plus | Diethylamino Hydroxybenzoyl |
| | | | Hexyl Benzoate |
| | 3.00 | Uvinul N 539 T | Octocrylene |
| | 3.00 | Emulgade PL 68/50 | Cetearyl Glucoside, Cetearyl Alcohol |
| | 2.00 | Dracorin 100 SE | Glyceryl Stearate, PEG-100 Stearate |
| | 1.00 | Fitoderm | Squalane |
| | 0.50 | Cremophor WO 7 | PEG-7 Hydrogenated Castor Oil |
| | 0.50 | Cremophor PS 20 | Polysorbate 20 |
| | 2.00 | Dry Flo Pure | Aluminum Starch Octenylsuccinate |
| B | 5.00 | T-Lite SF | Titanium Dioxide, Alumina Hydrate, |
| | | | Dimethicone/Methicone Copolymer |
| C | 4.00 | 1,2-Propylene | Propylene Glycol |
| | | Glycol Care | |
| | 0.20 | Keltrol | Xanthan Gum |
| | 0.50 | Simulgel 600 | Acrylamide/Sodium |
| | | | Acryloyldimethyltaurate Copolymer, |
| | | | Isohexadecane, Polysorbate 80 |
| | ad 100 | Water demin. | Aqua dem. |
| | q.s. | Preservative | |
| | 0.50 | Vitamin E acetate | Tocopheryl Acetate |
| | 2% | Fusion protein-KBD | |
| | 1.00 | RetiSTAR | Caprylic/Capric Triglyceride, |
| | | | Sodium Ascorbate, Tocopherol, |
| | | | Retinol |

| | | | |
|---|---|---|---|
| A | 1.00 | Abil Care 85 | Bis-PEG/PPG-16/16 PEG/PPG-16/16 |
| | | | Dimethicone, Caprylic/Capric |
| | | | Triglyceride |
| | 3.00 | Cremophor CO 40 | PEG-40 Hydrogenated Castor Oil |
| | 0.30 | Cremophor WO 7 | PEG-7 Hydrogenated Castor Oil |
| | 2.00 | Parsol 1789 | Butyl Methoxydibenzoylmethane |
| | 2.00 | Mexoryl XL | Drometrizole Trisiloxane |
| | 10.00 | Witconol APM | PPG-3 Myristyl Ether |
| | 1.00 | Uvinul T 150 | Ethylhexyl Triazone |
| | 1.00 | Dow Corning 345 | Cyclopentasiloxane, |
| | | Fluid | Cyclohexasiloxane |
| | 5.00 | Uvinul N 539 T | Octocrylene |
| B | 3.00 | Z-COTE MAX | Zinc Oxide (and) Diphenyl |
| | | | Capryl Methicone |
| C | 5.00 | 1,2-Propylene Glycol | Propylene Glycol |
| | 1.00 | Mexoryl SX | Terephthalidene Dicamphor |
| | | | Sulfanic Acid |
| | 0.20 | Keltrol | Xanthan Gum |
| | 0.06 | Edeta BD | Disodium EDTA |
| | 0.04 | TEA | Triethanolamine |
| | 0.30 | Carbopol Ultrez 10P | Carbomer |
| | 63.50 | Water demin. | Aqua dem. |
| | 1% | Fusion protein-KBD | |
| D | q.s. | Perfume oil | |
| | 0.50 | Glydant | DMDM Hydantoin |

| | | | |
|---|---|---|---|
| A | 5.50 | Uvinul MC 80 | Ethylhexyl Methoxycinnamate |
| | 2.00 | Uvinul A Plus | Diethylamino Hydroxybenzoyl Hexyl Benzoate |
| | 3.00 | Uvinul N 539 T | Octocrylene |
| | 3.00 | Emulgade PL 68/50 | Cetearyl Glucoside, Cetearyl Alcohol |
| | 2.00 | Dracorin 100 SE | Glyceryl Stearate, PEG-100 Stearate |
| | 1.00 | Fitoderm | Squalane |
| | 0.50 | Cremophor WO 7 | PEG-7 Hydrogenated Castor Oil |
| | 0.50 | Cremophor PS 20 | Polysorbate 20 |
| | 2.00 | Dry Flo Pure | Aluminum Starch Octenylsuccinate |
| B | 5.00 | T-Lite SF-S | Titanium Dioxide, Silica Hydrate, Alumina |
| | | | Hydrate, Methicone/Dimethicone Copolymer |
| C | 4.00 | 1,2-Propylene Glycol Care | Propylene Glycol |
| | 0.20 | Keltrol | Xanthan Gum |
| | 2.00 | Simulgel NS | Hydroxyethyl Acrylate/Sodium Acryloyldimethyl |
| | | | Taurate Copolymer, Squalane, Polysorbate 60 |
| | 66.30 | Water demin. | Aqua dem. |
| | q.s. | Preservative | |
| | 0.50 | Vitamin E acetate | Tocopheryl Acetate |
| | 0.5% | Fusion protein-KBD | |
| | 1.00 | RetiSTAR | Caprylic/Capric Triglyceride, Sodium Ascorbate, |
| | | | Tocopherol, Retinol |

| | | | |
|---|---|---|---|
| A | 2.00 | Cremophor A 6 | Ceteareth-6, Stearyl Alcohol |
| | 2.00 | Cremophor A 25 | Ceteareth-25 |
| | 3.00 | Syncrowax HRC | Tribehenin |
| | 2.00 | Lanette O | Cetearyl Alcohol |
| | 2.00 | Luvitol EHO | Cetearyl Ethylhexanoate |
| | 5.00 | Uvinul MC 80 | Ethylhexyl Methoxycinnamate |
| | 1.00 | Ganex V-220 | VP/Eicosene Copolymer |
| | 7.00 | Isopropyl Palmitate | Isopropyl Palmitate |
| B | 3.00 | Z-COTE MAX | Zinc Oxide (and) Diphenyl Capryl Methicone |
| C | 0.20 | Keltrol | Xanthan Gum |
| | 0.50 | Simulgel NS | Hydroxyethyl Acrylate/Sodium |
| | | | Acryloyldimethyl Taurate Copolymer, |
| | | | Squalane, Polysorbate 60 |
| | 65.10 | Water demin. | Aqua dem. |
| | 0.20 | Edeta BD | Disodium EDTA |
| | 5.00 | 1,2-Propylene Glycol Care | Propylene Glycol |
| | 0.5% | Fusion protein-KBD | |
| D | 1.00 | Vitamin E acetate | Tocopheryl Acetate |
| | q.s. | Preservative | |

| | | | |
|---|---|---|---|
| A | 2.00 | Cremophor A 6 | Ceteareth-6, Stearyl Alcohol |
| | 2.00 | Cremophor A 25 | Ceteareth-25 |
| | 3.00 | Syncrowax HRC | Tribehenin |
| | 2.00 | Lanette O | Cetearyl Alcohol |
| | 2.00 | Luvitol EHO | Cetearyl Ethylhexanoate |
| | 5.00 | Uvinul MC 80 | Ethylhexyl Methoxycinnamate |
| | 1.00 | Ganex V-220 | VP/Eicosene Copolymer |
| | 7.00 | Isopropyl Palmitate | Isopropyl Palmitate |
| B | 3.00 | T-Lite SF | Titanium Dioxide, Alumina Hydrate, |
| | | | Dimethicone/Methicone Copolymer |
| C | 0.50 | Keltrol | Xanthan Gum |
| | 0.50 | Simulgel NS | Hydroxyethyl Acrylate/Sodium |
| | | | Acryloyldimethyl Taurate |
| | | | Copolymer, Squalane, |
| | | | Polysorbate 60 |
| | 65.10 | Water demin. | Aqua dem. |
| | 0.20 | Edeta BD | Disodium EDTA |
| | 5.00 | 1,2-Propylene | Propylene Glycol |
| | | Glycol Care | |
| | 0.5% | Fusion protein-KBD | |
| D | 1.00 | Vitamin E acetate | Tocopheryl Acetate |
| | q.s. | Preservative | |

| | | | |
|---|---|---|---|
| A | 2.00 | Cremophor A 6 | Ceteareth-6, Stearyl Alcohol |
| | 2.00 | Cremophor A 25 | Ceteareth-25 |
| | 3.00 | Syncrowax HRC | Tribehenin |
| | 2.00 | Lanette O | Cetearyl Alcohol |
| | 2.00 | Luvitol EHO | Cetearyl Ethylhexanoate |
| | 5.00 | Uvinul MC 80 | Ethylhexyl Methoxycinnamate |
| | 1.00 | Ganex V-220 | VP/Eicosene Copolymer |
| | 7.00 | Isopropyl Palmitate | Isopropyl Palmitate |
| B | 3.00 | T-Lite SF-S | Titanium Dioxide, Silica Hydrate, Alumina |
| | | | Hydrate, Methicone/Dimethicone Copolymer |
| C | 0.50 | Keltrol | Xanthan Gum |
| | 0.50 | Simulgel NS | Hydroxyethyl Acrylate/Sodium |
| | | | Acryloyldimethyl Taurate Copolymer, |
| | | | Squalane, Polysorbate 60 |
| | 64.60 | Water demin. | Aqua dem. |
| | 0.20 | Edeta BD | Disodium EDTA |
| | 5.00 | 1,2-Propylene Glycol Care | Propylene Glycol |
| | 1% | Fusion protein-KBD | |
| D | 1.00 | Vitamin E acetate | Tocopheryl Acetate |
| | q.s. | Preservative | |

| | | | |
|---|---|---|---|
| A | 2.00 | Cremophor A 6 | Ceteareth-6, Stearyl Alcohol |
| | 2.00 | Cremophor A 25 | Ceteareth-25 |
| | 3.00 | Syncrowax HRC | Tribehenin |
| | 2.00 | Lanette O | Cetearyl Alcohol |
| | 2.00 | Luvitol EHO | Cetearyl Ethylhexanoate |
| | 5.00 | Uvinul MC 80 | Ethylhexyl Methoxycinnamate |
| | 1.00 | Ganex V-220 | VP/Eicosene Copolymer |
| | 7.00 | Isopropyl Palmitate | Isopropyl Palmitate |
| B | 3.00 | T-Lite SF-S | Titanium Dioxide, Silica Hydrate, Alumina |
| | | | Hydrate, Methicone/Dimethicone Copolymer |
| C | 0.50 | Keltrol | Xanthan Gum |
| | 0.50 | Simulgel NS | Hydroxyethyl Acrylate/Sodium |
| | | | Acryloyldimethyl Taurate Copolymer, |
| | | | Squalane, Polysorbate 60 |
| | 64.10 | Water demin. | Aqua dem. |
| | 2.00 | Neoheliopan AP | Disodium Phenyl Dibenzimidazole |
| | | | Tetrasulfonate |
| | 0.20 | Edeta BD | Disodium EDTA |
| | 5.00 | 1,2-Propylene Glycol Care | Propylene Glycol |
| D | 1.00 | Vitamin E acetate | Tocopheryl Acetate |
| | 1% | Fusion protein-KBD | |
| | q.s. | Preservative | |

| | | | |
|---|---|---|---|
| A | 2.00 | Cremophor A 6 | Ceteareth-6, Stearyl Alcohol |
| | 2.00 | Cremophor A 25 | Ceteareth-25 |
| | 3.00 | Syncrowax HRC | Tribehenin |
| | 2.00 | Lanette O | Cetearyl Alcohol |
| | 2.00 | Luvitol EHO | Cetearyl Ethylhexanoate |
| | 7.00 | Uvinul N 539 T | Octocrylene |
| | 1.00 | Ganex V-220 | VP/Eicosene Copolymer |
| | 7.00 | Isopropyl Palmitate | Isopropyl Palmitate |
| B | 3.00 | T-Lite SF-S | Titanium Dioxide, Silica Hydrate, Alumina |
| | | | Hydrate, Methicone/Dimethicone Copolymer |
| C | 0.50 | Keltrol | Xanthan Gum |
| | 0.50 | Simulgel NS | Hydroxyethyl Acrylate/Sodium |
| | | | Acryloyldimethyl Taurate Copolymer, |
| | | | Squalane, Polysorbate 60 |
| | 64.60 | Water demin. | Aqua dem. |
| | 1.00 | Mexoryl SX | Terephthalidene Dicamphor Sulfonic Acid |
| | 0.20 | Edeta BD | Disodium EDTA |
| | 5.00 | 1,2-Propylene Glycol Care | Propylene Glycol |
| D | 1.00 | Vitamin E acetate | Tocopheryl Acetate |
| | 1% | Fusion protein-KBD | |
| | q.s. | Preservative | |

| | | | |
|---|---|---|---|
| A | 2.00 | Cremophor A 6 | Ceteareth-6, Stearyl Alcohol |
| | 2.00 | Cremophor A 25 | Ceteareth-25 |
| | 3.00 | Syncrowax HRC | Tribehenin |
| | 2.00 | Lanette O | Cetearyl Alcohol |
| | 2.00 | Luvitol EHO | Cetearyl Ethylhexanoate |
| | 2.00 | Mexoryl XL | Drometrizole Trisiloxane |
| | 5.00 | Uvinul N 539 T | Octocrylene |
| | 1.00 | Ganex V-220 | VP/Eicosene Copolymer |
| | 7.00 | Isopropyl Palmitate | Isopropyl Palmitate |
| B | 3.00 | T-Lite SF | Titanium Dioxide, Alumina Hydrate, |
| | | | Dimethicone/Methicone Copolymer |
| C | 0.50 | Keltrol | Xanthan Gum |
| | 0.50 | Simulgel NS | Hydroxyethyl Acrylate/Sodium |
| | | | Acryloyldimethyl Taurate |
| | | | Copolymer, Squalane, |
| | | | Polysorbate 60 |
| | 65.10 | Water demin. | Aqua dem. |
| | 0.20 | Edeta BD | Disodium EDTA |
| | 5.00 | 1,2-Propylene | Propylene Glycol |
| D | 1.00 | Vitamin E acetate | Tocopheryl Acetate |
| | 0.5% | Fusion protein-KBD | |
| | q.s. | Preservative | |

| | | | |
|---|---|---|---|
| | 1.00 | Urea | Urea |
| | 2.00 | Neoheliopan AP | Disodium Phenyl Dibenzimidazole |
| | | | Tetrasulfonate |
| | 2.00 | Glycerin 87% | Glycerin |
| | 1.20 | Aristoflex AVC | Ammonium Acryloyldimethyltaurate/ |
| | | | VP Copolymer |
| | 71.30 | Water demin. | Aqua dem. |
| B | 3.00 | Cremophor CO 40 | PEG-40 Hydrogenated Castor Oil |
| | q.s. | Perfume oil | |
| | 5.00 | Miglyol 812 | Caprylic/Capric Triglyceride |
| | 2.00 | Uvinul N 539 T | Octocrylene |
| | 8.00 | Z-COTE MAX | Zinc Oxide (and) Diphenyl Capryl |
| | | | Methicone |
| | 5% | Fusion protein-KBD | |
| | q.s. | Preservative | |

| | | |
|---|---|---|
| 5.00 | Z-COTE MAX | Zinc Oxide (and) Diphenyl Capryl |
| | | Methicone |
| 2.00 | Parsol 1789 | Butyl Methoxydibenzoylmethane |
| 1.00 | Uvinul T150 | Ethylhexyl Triazone |
| 5.00 | Uvinul MC 80 | Ethylhexyl Methoxycinnamate |
| 2.00 | Uvinul T 539 N | Octocrylene |
| 0.50 | Abil 350 | Dimethicone |
| 2.75 | Carnico wax LT 20 | Carnauba (Copernica Cerifera) |
| | | Wax,Paraffin |
| 3.70 | Candelilla wax LT 281 LJ | Candelilla (Euphorbia Cerifera) |
| 1.80 | Beeswax 3050 PH | Wax Beeswax |
| 3.20 | TeCero wax 30445 | Microcrystalline Wax |
| 3.20 | TeCero wax 1030 K | Microcrystalline Wax |
| 1.34 | Cutina CP | Cetyl Palmitate |
| 6.40 | Vaseline | Petrolatum |
| 7.30 | Softisan 100 | Hydrogenated Coco-Glycerides |
| 10.00 | Luvitol EHO | Cetearyl Ethylhexanoate |
| 0.17 | Bisabolol nat. | Bisabolol |
| 1.84 | Vitamin E acetate | Tocopheryl Acetate |
| 0.42 | D,L-Alpha-Tocopherol | Tocopherol |
| 1% | Fusion protein-KBD | |
| 40.38 | castor oil | Castor (Ricinus Communis) Oil |

| | | |
|---|---|---|
| 5.00 | T-Lite SF | Titanium Dioxide, Alumina Hydrate, |
| | | Dimethicone/Methicone Copolymer |
| 2.00 | Parsol 1789 | Butyl Methoxydibenzoylmethane |
| 1.00 | Uvinul T150 | Ethylhexyl Triazone |
| 3.00 | Uvinul MC 80 | Ethylhexyl Methoxycinnamate |
| 2.00 | Uvinul N 539 T | Octocrylene |
| 0.50 | Abil 350 | Dimethicone |
| 2.75 | Carnico wax LT 20 | Carnauba (Copernica Cerifera) Wax, |
| | | Paraffin |
| 3.70 | Candelilla wax LT 281 | Candelilla (Euphorbia Cerifera) Wax |
| | LJ | |
| 1.80 | Beeswax 3050 PH | Beeswax |
| 3.20 | TeCero wax 30445 | Microcrystalline Wax |
| 3.20 | TeCero wax 1030 K | Microcrystalline Wax |
| 1.34 | Cutina CP | Cetyl Palmitate |
| 6.40 | Vaseline | Petrolatum |
| 7.30 | Softisan 100 | Hydrogenated Coco-Glycerides |
| 10.00 | Luvitol EHO | Cetearyl Ethylhexanoate |
| 0.17 | Bisabolol nat. | Bisabolol |
| 1.84 | Vitamin E acetate | Tocopheryl Acetate |
| 0.42 | D,L-Alpha-Tocopherol | Tocopherol |
| 1% | Fusion protein-KBD | |
| 40.38 | castor oil | Castor (Ricinus Communis) Oil |

| | | |
|---|---|---|
| 5.00 | T-Lite SF-S | Titanium Dioxide, Silica Hydrate, |
| | | Alumina Hydrate, |
| | | Methicone/Dimethicone Copolymer |
| 2.00 | Uvinul A Plus | Diethylamino Hydroxybenzoyl Hexyl |
| | | Benzoate |
| 2.00 | Mexoryl XL | Drometrizole Trisiloxane |
| 3.00 | Uvinul MC 80 | Ethylhexyl Methoxycinnamate |
| 0.50 | Abil 350 | Dimethicone |
| 2.75 | Carnico wax LT 20 | Carnauba (Copernica Cerifera) Wax, |
| | | Paraffin |
| 3.70 | Candelilla wax LT 281 | Candelilla (Euphorbia Cerifera) Wax |
| | LJ | |
| 1.80 | Beeswax 3050 PH | Beeswax |
| 3.20 | TeCero wax 30445 | Microcrystalline Wax |
| 3.20 | TeCero wax 1030 K | Microcrystalline Wax |
| 1.34 | Cutina CP | Cetyl Palmitate |
| 6.40 | Vaseline | Petrolatum |
| 7.30 | Softisan 100 | Hydrogenated Coco-Glycerides |
| 10.00 | Luvitol EHO | Cetearyl Ethylhexanoate |
| 0.17 | Bisabolol nat. | Bisabolol |
| 1.84 | Vitamin E acetate | Tocopheryl Acetate |
| 0.42 | D,L-Alpha-Tocopherol | Tocopherol |
| 2% | Fusion protein-KBD | |
| 39.38 | castor oil | Castor (Ricinus Communis) Oil |

| | | | |
|---|---|---|---|
| A | 6.00 | Cremophor WO 7 | PEG-7 Hydrogenated Castor Oil |
| | 2.00 | Elfacos ST 9 | PEG-45/Dodecyl Glycol Copolymer |
| | 3.00 | Isopropyl myristate | Isopropyl Myristate |
| | 8.00 | Jojoba oil | Simmondsia Chinensis (Jojoba) Seed Oil |
| | 4.00 | Uvinul MC 80 | Ethylhexyl Methoxycinnamate |
| | 2.00 | Uvinul A Plus | Diethylamino Hydroxybenzoyl Hexyl Benzoate |
| | 1.00 | Abil 350 | Dimethicone |
| B | 5.00 | Z-COTE MAX | Zinc Oxide (and) Diphenyl Capryl Methicone |
| | 3.00 | T-Lite SF | Titanium Dioxide, Alumina Hydrate, |
| | | | Dimethicone/Methicone Copolymer |
| C | 0.20 | Edeta BD | Disodium EDTA |
| | 5.00 | Glycerin 87% | Glycerin |
| | 0.30 | Chemag 2000 | Imidazolidinyl Urea |
| | 59.00 | Water demin. | Aqua dem. |
| D | q.s. | Perfume oil | |
| | 1% | Fusion protein-KBD | |
| | q.s. | Preservative | |

| | | | |
|---|---|---|---|
| | 2.00 | Cremophor A 6 | Ceteareth-6, Stearyl Alcohol |
| | 2.00 | Cremophor A 25 | Ceteareth-25 |
| | 3.00 | Syncrowax HRC | Tribehenin |
| | 2.00 | Lanette O | Cetearyl Alcohol |
| | 2.00 | Luvitol EHO | Cetearyl Ethylhexanoate |
| | 5.00 | Uvinul MC 80 | Ethylhexyl Methoxycinnamate |
| | 1.00 | Uvinul T 150 | Ethylhexyl Triazone |
| | 1.00 | Ganex V-220 | VP/Eicosene Copolymer |
| | 7.00 | Isopropyl myristate | Isopropyl Myristate |
| B | 5.00 | Z-COTE MAX | Zinc Oxide (and) Diphenyl Capryl |
| | | | Methicone |
| C | 0.20 | Keltrol | Xanthan Gum |
| | 0.50 | Simulgel NS | Hydroxyethyl Acrylate/Sodium |
| | | | Acryloyldimethyl Taurate |
| | | | Copolymer, Squalane, |
| | | | Polysorbate 60 |
| | 61.10 | Water demin. | Aqua dem. |
| | 0.20 | Edeta BD | Disodium EDTA |
| | 5.00 | 1,2-Propylene | Propylene Glycol |
| | | Glycol Care | |
| D | 1.00 | Vitamin E acetate | Tocopheryl Acetate |
| | 1.5% | Fusion protein-KBD | |
| | q.s. | Preservative | |

| | | | |
|---|---|---|---|
| A | 2.00 | Luvitol EHO | Cetearyl Ethylhexanoate |
| | 5.00 | Paraffin oil | Mineral Oil |
| | 5.00 | Z-COTE MAX | Zinc Oxide (and) Diphenyl Capryl |
| | | | Methicone |
| B | 1.00 | Cremophor A 6 | Ceteareth-6, Stearyl Alcohol |
| | 2.00 | Cremophor A 25 | Ceteareth-25 |
| | 3.00 | Glycerin monostearate | Glyceryl Stearate |
| | 4.00 | Cetylstearyl alcohol | Cetearyl Alcohol |
| C | 5.00 | 1,2-Propylene | Propylene Glycol |
| | | Glycol Care | |
| | 7.50 | Luviquat Care | Polyquaternium-44 |
| | q.s. | Preservative | |
| | q.s. | Perfume oil | |
| | 1% | Fusion protein-KBD | |
| | 64.50 | Water demin. | Aqua dem. |

| | | |
|---|---|---|
| 5.00 | T-Lite SF | Titanium Dioxide, Alumina Hydrate, |
| | | Dimethicone/Methicone Copolymer |
| 10.00 | Z-COTE MAX | Zinc Oxide (and) Diphenyl Capryl |
| | | Methicone |
| 12.00 | Beeswax 3044 PH | Beeswax |
| 8.00 | Candelilla wax LT 281 LJ | Candelilla (Euphorbia Cerifera) Wax |
| 5.00 | Tegin | Glyceryl Stearate SE |
| 5.00 | Dow Corning 345 Fluid | Cyclopentasiloxane, |
| | | Cyclohexasiloxane |
| 5.00 | Witconol APM | PPG-3 Myristyl Ether |
| 5.00 | Softisan 154 | Hydrogenated Palm Oil |
| 8.00 | Paraffin oil, high-viscosity | Mineral Oil |
| 3.00 | Vaseline | Petrolatum |
| 2% | Fusion protein-KBD | |
| 32.00 | castor oil | Castor (Ricinus Communis) Oil |

| | | |
|---|---|---|
| 3.00 | Uvinul MC 80 | Ethylhexyl Methoxycinnamate |
| 2.00 | Uvinul T 150 | Ethylhexyl Triazone |
| 2.00 | Uvinul A Plus | Diethylamino Hydroxybenzoyl Hexyl |
| | | Benzoate |
| 10.00 | Z-COTE MAX | Zinc Oxide (and) Diphenyl Capryl |
| | | Methicone |
| 12.00 | Beeswax 3044 PH | Beeswax |
| 3.00 | Vaseline | Petrolatum |
| 8.00 | Candelilla wax LT 281 LJ | Candelilla (Euphorbia Cerifera) Wax |
| 8.00 | Paraffin oil, high-viscosity | Mineral Oil |
| 5.00 | Tegin | Glyceryl Stearate SE |
| 5.00 | Softisan 154 | Hydrogenated Palm Oil |
| 5.00 | Witconol APM | PPG-3 Myristyl Ether |
| 5.00 | Dow Corning 345 Fluid | Cyclopentasiloxane, |
| | | Cyclohexasiloxane |
| 0.1% | Fusion protein-KBD | |
| 28.90 | castor oil | Castor (Ricinus Communis) Oil |

| | | | |
|---|---|---|---|
| | 5.00 | T-Lite SF | Titanium Dioxide, Alumina |
| | | | Hydrate, Dimethicone/Methicone |
| | | | Copolymer |
| | 6.00 | Finsolv TN | C12-15 Alkyl Benzoate |
| | 10.00 | Uvinul MC 80 | Ethylhexyl Methoxycinnamate |
| | 6.00 | Miglyol 812 | Caprylic/Capric Triglyceride |
| | 5.00 | Arlacel P 135 | PEG-30 Dipolyhydroxystearate |
| | 2.00 | Ganex V 216 | PVP/Hexadecene Copolymer |
| | 2.00 | Elfacos ST 9 | PEG-45/Dodecyl Glycol Copolymer |
| B | 3.00 | 1,2-Propylene | Propylene Glycol |
| | | Glycol Care | |
| | 0.10 | Edeta BD | Disodium EDTA |
| | 1.00 | Magnesium sulfate | Magnesium Sulfate |
| | | 7-hydrate | |
| | 59.40 | Water demin. | Aqua dem. |
| | 0.5% | Fusion protein-KBD | |
| | q.s. | Preservative | |

| | | | |
|---|---|---|---|
| A | 4.00 | Dehymuls SBL | Polyglyceryl-2 Dipolyhydroxystearate, |
| | | | Dicaprylyl Ether, Cocoglycerides, |
| | | | Sorbitan Sesquioleate, Cera Alba, |
| | | | Aluminum Stearates, Dicocoyl |
| | | | Pentaerythrityl Distearyl Citrate |
| | 1.00 | Dehymuls PGPH | Polyglyceryl-2 Dipolyhydroxystearate |
| | 8.00 | Finsolv TN | C12-15 Alkyl Benzoate |
| | 4.00 | Miglyol 812 | Caprylic/Capric Triglyceride |
| | 4.00 | Uvinul MC 80 | Ethylhexyl Methoxycinnamate |
| | 2.00 | Uvinul N 539 T | Octocrylene |
| B | 5.00 | Z-COTE MAX | Zinc Oxide (and) Diphenyl Capryl |
| | | | Methicone |
| C | 3.00 | 1,2-Propylene | Propylene Glycol |
| | | Glycol Care | |
| | 0.30 | Abiol | Imidazolidinyl Urea |
| | 1.00 | Magnesium | Magnesium Sulfate |
| | | sulfate 7-hydrate | |
| | ad 100 | Water demin. | Aqua dem. |
| | 1.5% | Fusion protein- | |
| | | KBD | |
| D | q.s. | Preservative | |

| | | | |
|---|---|---|---|
| A | 4.00 | Dehymuls SBL | Polyglyceryl-2 Dipolyhydroxystearate, |
| | | | Dicaprylyl Ether, Cocoglycerides, |
| | | | Sorbitan Sesquioleate, Cera Alba, |
| | | | Aluminum Stearates, Dicocoyl |
| | | | Pentaerythrityl Distearyl Citrate |
| | 1.00 | Dehymuls PGPH | Polyglyceryl-2 Dipolyhydroxystearate |
| | 8.00 | Finsolv TN | C12-15 Alkyl Benzoate |
| | 4.00 | Miglyol 812 | Caprylic/Capric Triglyceride |
| | 4.00 | Uvinul MC 80 | Ethylhexyl Methoxycinnamate |
| | 2.00 | Uvinul N 539 T | Octocrylene |
| B | 5.00 | T-Lite SF-S | Titanium Dioxide, Silica Hydrate, |
| | | | Alumina Hydrate, Methicone/ |
| | | | Dimethicone Copolymer |
| C | 3.00 | 1,2-Propylene | Propylene Glycol |
| | | Glycol Care | |
| | 0.30 | Abiol | Imidazolidinyl Urea |
| | 1.00 | Magnesium | Magnesium Sulfate |
| | | sulfate 7-hydrate | |
| | 1% | Fusion protein- | |
| | | KBD | |
| | ad 100 | Water demin. | Aqua dem. |
| D | q.s. | preservative | |

| | | | |
|---|---|---|---|
| A | 4.00 | Dehymuls SBL | Polyglyceryl-2 Dipolyhydroxystearate, |
| | | | Dicaprylyl Ether, Cocoglycerides, |
| | | | Sorbitan Sesquioleate, Cera Alba, |
| | | | Aluminum Stearates, Dicocoyl |
| | | | Pentaerythrityl Distearyl Citrate |
| | 1.00 | Dehymuls PGPH | Polyglyceryl-2 Dipolyhydroxystearate |
| | 8.00 | Finsolv TN | C12-15 Alkyl Benzoate |
| | 4.00 | Miglyol 812 | Caprylic/Capric Triglyceride |
| | 8.00 | Uvinul A | Ethylhexyl Methoxycinnamate and |
| | | Plus B | Diethylamino Hydroxybenzoyl hexyl |
| | | | Benzoate |
| | 2.00 | Uvinul N 539 T | Octocrylene |
| B | 5.00 | Z-COTE MAX | Zinc Oxide (and) Diphenyl Capryl |
| | | | Methicone |
| C | 3.00 | 1,2-Propylene | Propylene Glycol |
| | | Glycol Care | |
| | 0.30 | Abiol | Imidazolidinyl Urea |
| | 1.00 | Magnesium | Magnesium Sulfate |
| | | sulfate 7-hydrate | |
| | 0.1% | Fusion protein- | |
| | | KBD | |
| | ad 100 | Water demin. | Aqua dem. |
| | q.s. | Preservative | |

| | | | |
|---|---|---|---|
| A | 4.00 | Dehymuls SBL | Polyglyceryl-2 Dipolyhydroxystearate, |
| | | | Dicaprylyl Ether, Cocoglycerides, |
| | | | Sorbitan Sesquioleate, Cera Alba, |
| | | | Aluminum Stearates, Dicocoyl |
| | | | Pentaerythrityl Distearyl Citrate |
| | 1.00 | Dehymuls | Polyglyceryl-2 Dipolyhydroxystearate |
| | | PGPH | |
| | 8.00 | Finsolv TN | C12-15 Alkyl Benzoate |
| | 4.00 | Miglyol 812 | Caprylic/Capric Triglyceride |
| | 8.00 | Uvinul A Plus B | Ethylhexyl Methoxycinnamate and |
| | | | Diethylamino Hydroxybenzoyl Hexyl |
| | | | Benzoate |
| | 2.00 | Uvinul N 539 T | Octocrylene |
| B | 5.00 | T-Lite SF | Titanium Dioxide, Alumina |
| | | | Hydrate, Dimethicone/Methicone |
| | | | Copolymer |
| C | 3.00 | 1,2-Propylene | Propylene Glycol |
| | | Glycol Care | |
| | 0.30 | Abiol | Imidazolidinyl Urea |
| | 1.00 | Magnesium | Magnesium Sulfate |
| | | sulfate | |
| | | 7-hydrate | |
| | ad 100 | Water demin. | Aqua dem. |
| | 0.2% | Fusion protein- | |
| | | KBD | |
| | q.s. | Preservative | |

| | | | |
|---|---|---|---|
| A | 4.00 | Dehymuls SBL | Polyglyceryl-2 Dipolyhydroxystearate, |
| | | | Dicaprylyl Ether, Cocoglycerides, |
| | | | Sorbitan Sesquioleate, Cera Alba, |
| | | | Aluminum Stearates, Dicocoyl |
| | | | Pentaerythrityl Distearyl Citrate |
| | 1.00 | Dehymuls PGPH | Polyglyceryl-2 Dipolyhydroxystearate |
| | 8.00 | Finsolv TN | C12-15 Alkyl Benzoate |
| | 4.00 | Miglyol 812 | Caprylic/Capric Triglyceride |
| | 8.00 | Uvinul A Plus B | Ethylhexyl Methoxycinnamate and |
| | | | Diethylamino Hydroxybenzoyl hexyl |
| | | | Benzoate |
| | 2.00 | Uvinul N 539 T | Octocrylene |
| B | 5.00 | T-Lite SF-S | Titanium Dioxide, Silica Hydrate, |
| | | | Alumina Hydrate, Methicone/ |
| | | | Dimethicone Copolymer |
| C | 3.00 | 1,2-Propylene | Propylene Glycol |
| | | Glycol Care | |
| | 0.30 | Abiol | Imidazolidinyl Urea |
| | 1.00 | Magnesium | Magnesium Sulfate |
| | | sulfate 7-hydrate | |
| | 0.5% | Fusion protein- | |
| | | KBD | |
| | ad 100 | Water demin. | Aqua dem. |
| | q.s. | Preservative | |

| | | | |
|---|---|---|---|
| A | 4.00 | Dehymuls SBL | Polyglyceryl-2 Dipolyhydroxystearate, |
| | | | Dicaprylyl Ether, Cocoglycerides, |
| | | | Sorbitan Sesquioleate, Cera Alba, |
| | | | Aluminum Stearates, Dicocoyl |
| | | | Pentaerythrityl Distearyl Citrate |
| | 1.00 | Dehymuls PGPH | Polyglyceryl-2 Dipolyhydroxystearate |
| | 8.00 | Finsolv TN | C12-15 Alkyl Benzoate |
| | 4.00 | Miglyol 812 | Caprylic/Capric Triglyceride |
| | 7.00 | Uvinul MC 80 | Ethylhexyl Methoxycinnamate |
| | 2.00 | Mexoryl XL | Drometrizole Trisiloxane |
| B | 5.00 | Z-COTE MAX | Titanium Dioxide, Alumina Hydrate, |
| | | | Dimethicone/Methicone Copolymer |
| C | 3.00 | 1,2-Propylene | Propylene Glycol |
| | | Glycol Care | |
| | 0.30 | Abiol | Imidazolidinyl Urea |
| | 1.00 | Magnesium | Magnesium Sulfate |
| | | sulfate 7-hydrate | |
| | ad 100 | Water demin. | Aqua dem. |
| | 0.01% | Fusion protein- | |
| | | KBD | |
| | q.s. | Preservative | |

| | | | |
|---|---|---|---|
| A | 7.50 | Uvinul MC 80 | Ethylhexyl Methoxycinnamate |
| | 3.00 | Uvinul N 539 T | Octocrylene |
| | 2.00 | Uvinul A Plus | Diethylamino Hydroxybenzoyl Hexyl |
| | | | Benzoate |
| | 1.00 | Cremophor CO 40 | PEG-40 Hydrogenated Castor Oil |
| | 10.00 | Miglyol 812 | Caprylic/Capric Triglyceride |
| | 1.50 | Dow Corning 345 | Cyclopentasiloxane, |
| | | Fluid | Cyclohexasiloxane |
| B | 3.50 | Luvigel EM | Caprylic/Capric Triglyceride, Sodium |
| | | | Acrylates Copolymer |
| C | 46.00 | Water demin. | Aqua dem. |
| D | 5.00 | 1,2-Propylene | Propylene Glycol |
| | | Glycol Care | |
| | 0.50 | Cremophor A 25 | Ceteareth-25 |
| | 0.05% | Fusion protein-KBD | |
| | 20.00 | Ethanol 96% | Alcohol |

| | | | |
|---|---|---|---|
| A | 1.00 | Uvinul A Plus | Diethylamino Hydroxybenzoyl Hexyl |
| | | | Benzoate |
| | 1.00 | Tinosorb S | Bis-Ethylhexyloxyphenol |
| | | | Methoxyphenyl Triazine |
| | 3.00 | Uvinul MC 80 | Ethylhexyl Methoxycinnamate |
| | 8.00 | Miglyol 812 | Caprylic/Capric Triglyceride |
| | 1.50 | Dow Corning 350 | Dimethicone |
| | | Fluid | |
| | 3.00 | Z-COTE MAX | Titanium Dioxide, Alumina Hydrate, |
| | | | Dimethicone/Methicone Copolymer |
| | 3.00 | Finsolv TN | C12-15 Alkyl Benzoate |
| | 1.00 | Cremophor CO 40 | PEG-40 Hydrogenated Castor Oil |
| B | 2.00 | Luvigel EM | Caprylic/Capric Triglyceride, Sodium |
| | | | Acrylates Copolymer |
| C | 54.80 | Water demin. | Aqua dem. |
| D | 15.00 | Ethanol 96% | Alcohol |
| | 5.00 | 1,2-Propylene Glycol | Propylene Glycol |
| | | Care | |
| | 0.50 | Cremophor A 25 | Ceteareth-25 |
| | 1% | Fusion protein-KBD | |
| | 1.00 | Vitamin E acetate | Tocopheryl Acetate |
| | 0.20 | Bisabolol rac. | Bisabolol |

| | | | |
|---|---|---|---|
| A | 4.00 | Dehymuls SBL | Polyglyceryl-2 Dipolyhydroxy- |
| | | | stearate, Dicaprylyl Ether, |
| | | | Cocoglycerides, Sorbitan |
| | | | Sesquioleate, Cera Alba, Aluminum |
| | | | Stearates, Dicocoyl Pentaerythrityl |
| | | | Distearyl Citrate |
| | 1.00 | Dehymuls PGPH | Polyglyceryl-2 |
| | | | Dipolyhydroxystearate |
| | 6.00 | Finsolv TN | C12-15 Alkyl Benzoate |
| | 6.00 | Miglyol 812 | Caprylic/Capric Triglyceride |
| | 5.00 | Uvinul MC 80 | Ethylhexyl Methoxycinnamate |
| | 3.00 | Neoheliopan HMS | Homosalate |
| B | 5.00 | Z-COTE MAX | Zinc Oxide (and) Diphenyl Capryl |
| | | | Methicone |
| C | 3.00 | 1,2-Propylene | Propylene Glycol |
| | | Glycol Care | |
| | 0.30 | Chemag 2000 | Imidazolidinyl Urea |
| | 1.00 | Magnesium sulfate | Magnesium Sulfate |
| | | 7-hydrate | |
| | 65.10 | Water demin. | Aqua dem. |
| | 0.1% | Fusion protein-KBD | |
| | q.s. | Preservative | |

| | | | |
|---|---|---|---|
| A | 4.00 | Tego Care 450 | Polyglyceryl-3 Methyl Glucose |
| | | | Distearate |
| | 4.50 | Uvinul MC 80 | Ethylhexyl Methoxycinnamate |
| | 3.00 | Uvinul N 539 T | Octocrylene |
| | 2.00 | Uvinul T 150 | Ethylhexyl Triazone |
| | 0.50 | Vitamin E acetate | Tocopheryl Acetate |
| B | 5.00 | Isohexadecane | Isohexadecane |
| | 5.00 | Cosmacol EMI | Di-C12-13 Alkyl Malate |
| | 3.50 | Cetiol SN | Cetearyl Isononanoate |
| | 1.00 | Ganex V-220 | VP/Eicosene Copolymer |
| | 5.00 | T-Lite SF | Titanium Dioxide, Alumina |
| | | | Hydrate, Dimethicone/Methicone |
| | | | Copolymer |
| C | 60.00 | Water demin. | Water |
| | 5.00 | Glycerin 87% | Glycerin |
| | 1.00 | Lanette E | Sodium Cetearyl Sulfate |
| | 0.30 | Keltrol | Xanthan Gum |
| | 0.2% | Fusion protein- | |
| | | KBD | |
| D | q.s. | Preservative | |

| | | | |
|---|---|---|---|
| A | 4.00 | Tego Care 450 | Polyglyceryl-3 Methyl Glucose |
| | | | Distearate |
| | 4.50 | Uvinul MC 80 | Ethylhexyl Methoxycinnamate |
| | 3.00 | Uvinul N 539 T | Octocrylene |
| | 2.00 | Neoheliopan HMS | Homosalate |
| | 0.50 | Vitamin E acetate | Tocopheryl Acetate |
| B | 5.00 | Isohexadecane | Isohexadecane |
| | 5.00 | Cosmacol EMI | Di-C12-13 Alkyl Malate |
| | 3.50 | Cetiol SN | Cetearyl Isononanoate |
| | 1.00 | Ganex V-220 | VP/Eicosene Copolymer |
| | 5.00 | T-Lite SF | Titanium Dioxide, Alumina Hydrate, |
| | | | Dimethicone/Methicone Copolymer |
| C | 59.20 | Water demin. | Aqua dem. |
| | 5.00 | Glycerin 87% | Glycerin |
| | 1.00 | Lanette E | Sodium Cetearyl Sulfate |
| | 0.30 | Keltrol | Xanthan Gum |
| | 1% | Fusion protein-KBD | |
| D | q.s. | Preservative | |

| | | | |
|---|---|---|---|
| A | 4.00 | Tego Care 450 | Polyglyceryl-3 Methyl Glucose |
| | | | Distearate |
| | 4.50 | Uvinul MC 80 | Ethylhexyl Methoxycinnamate |
| | 3.00 | Neoheliopan OS | Octisalate |
| | 2.00 | Neoheliopan HMS | Homosalate |
| | 0.50 | Vitamin E acetate | Tocopheryl Acetate |
| B | 5.00 | Isohexadecane | Isohexadecane |
| | 5.00 | Cosmacol EMI | Di-C12-13 Alkyl Malate |
| | 3.50 | Cetiol SN | Cetearyl Isononanoate |
| | 1.00 | Ganex V-220 | VP/Eicosene Copolymer |
| | 5.00 | Z-COTE MAX | Zinc Oxide (and) Diphenyl Capryl |
| | | | Methicone |
| C | 60.15 | Water demin. | Aqua dem. |
| | 5.00 | Glycerin 87% | Glycerin |
| | 1.00 | Lanette E | Sodium Cetearyl Sulfate |
| | 0.30 | Keltrol | Xanthan Gum |
| | 0.05% | Fusion protein-KBD | |
| D | q.s. | Preservative | |

| | | | |
|---|---|---|---|
| A | 4.00 | Tego Care 450 | Polyglyceryl-3 Methyl Glucose |
| | | | Distearate |
| | 4.50 | Uvinul N 539 T | Octocrylene |
| | 3.00 | Neoheliopan OS | Octisalate |
| | 2.00 | Neoheliopan HMS | Homosalate |
| | 0.50 | Vitamin E acetate | Tocopheryl Acetate |
| B | 5.00 | Isohexadecane | Isohexadecane |
| | 5.00 | Cosmacol EMI | Di-C12-13 Alkyl Malate |
| | 3.50 | Cetiol SN | Cetearyl Isononanoate |
| | 1.00 | Ganex V-220 | VP/Eicosene Copolymer |
| | 5.00 | Z-COTE MAX | Zinc Oxide (and) Diphenyl Capryl |
| | | | Methicone |
| C | 60.19 | Water demin. | Aqua dem. |
| | 5.00 | Glycerin 87% | Glycerin |
| | 1.00 | Lanette E | Sodium Cetearyl Sulfate |
| | 0.30 | Keltrol | Xanthan Gum |
| | 0.01% | Fusion protein-KBD | |
| D | q.s. | Preservative | |

| | | | |
|---|---|---|---|
| A | 4.00 | Tego Care 450 | Polyglyceryl-3 Methyl Glucose |
| | | | Distearate |
| | 4.50 | Uvinul N 539 T | Octocrylene |
| | 3.00 | Neoheliopan OS | Octisalate |
| | 2.00 | Neoheliopan HMS | Homosalate |
| | 0.50 | Vitamin E acetate | Tocopheryl Acetate |
| B | 5.00 | Isohexadecane | Isohexadecane |
| | 5.00 | Cosmacol EMI | Di-C12-13 Alkyl Malate |
| | 3.50 | Cetiol SN | Cetearyl Isononanoate |
| | 1.00 | Ganex V-220 | VP/Eicosene Copolymer |
| | 5.00 | T-Lite SF-S | Titanium Dioxide, Silica Hydrate, |
| | | | Alumina Hydrate, |
| | | | Methicone/Dimethicone Copolymer |
| C | 59.20 | Water demin. | Aqua dem. |
| | 5.00 | Glycerin 87% | Glycerin |
| | 1.00 | Lanette E | Sodium Cetearyl Sulfate |
| | 0.3 | Keltrol | Xanthan Gum |
| | 1% | Fusion protein-KBD | |
| D | q.s. | Preservative | |

| | | | |
|---|---|---|---|
| A | 8.00 | Cetiol B | Dibutyl Adipate |
| | 8.00 | Finsolv TN | C12-15 Alkyl Benzoate |
| | 12.00 | Myritol 331 | Cocoglycerides |
| | 1.00 | Lanette E | Sodium Cetearyl Sulfate |
| | 4.00 | Eumulgin VL 75 | Lauryl Glucoside, Polyglyceryl-2 |
| | | | Dipolyhydroxystearate, Glycerin |
| | 2.00 | Lanette O | Cetearyl Alcohol |
| | 3.00 | Tinosorb S | Bis-Ethylhexyloxyphenol |
| | | | Methoxyphenyl Triazine |
| | 1.00 | Vitamin E acetate | Tocopheryl Acetate |
| B | 4.00 | Z-COTE MAX | Zinc Oxide (and) Diphenyl Capryl |
| | | | Methicone |
| C | 3.00 | Glycerin 87% | Glycerin |
| | 0.05 | Edeta BD | Disodium EDTA |
| | 0.20 | Allantoin | Allantoin |
| | 0.30 | Keltrol | Xanthan Gum |
| | 1.50 | Veegum Ultra | Magnesium Aluminum Silicate |
| | 49.45 | Water demin. | Aqua dem. |
| | 1% | Fusion protein-KBD | |
| D | q.s. | Preservative | |

| | | | |
|---|---|---|---|
| A | 8.00 | Cetiol B | Dibutyl Adipate |
| | 8.00 | Finsolv TN | C12-15 Alkyl Benzoate |
| | 12.00 | Myritol 331 | Cocoglycerides |
| | 1.00 | Lanette E | Sodium Cetearyl Sulfate |
| | 4.00 | Eumulgin VL 75 | Lauryl Glucoside, Polyglyceryl-2 |
| | | | Dipolyhydroxystearate, Glycerin |
| | 2.00 | Lanette O | Cetearyl Alcohol |
| | 3.00 | Tinosorb S | Bis-Ethylhexyloxyphenol |
| | | | Methoxyphenyl Triazine |
| | 1.00 | Vitamin E acetate | Tocopheryl Acetate |
| B | 4.00 | T-Lite SF | Titanium Dioxide, Alumina Hydrate, |
| | | | Dimethicone/Methicone Copolymer |
| C | 3.00 | Glycerin 87% | Glycerin |
| | 0.05 | Edeta BD | Disodium EDTA |
| | 0.20 | Allantoin | Allantoin |
| | 0.30 | Keltrol | Xanthan Gum |
| | 1.50 | Veegum Ultra | Magnesium Aluminum Silicate |
| | 50.25 | Water demin. | Aqua dem. |
| D | 0.50 | Citric acid | Citric Acid |
| | q.s. | Perfume oil | |
| | 0.2% | Fusion protein-KBD | |
| | q.s. | Preservative | |

| | | | |
|---|---|---|---|
| A | 5.00 | Cosmacol EMI | Di-C12-13 Alkyl Malate |
| | 4.50 | Uvinul MC 80 | Ethylhexyl Methoxycinnamate |
| | 3.00 | Uvinul N 539 T | Octocrylene |
| | 2.00 | Uvinul T 150 | Ethylhexyl Triazone |
| B | 4.00 | Tego Care 450 | Polyglyceryl-3 Methyl Glucose |
| | | | Distearate |
| | 5.00 | Isohexadecane | Isohexadecane |
| | 3.50 | Cetiol SN | Cetearyl Isononanoate |
| | 0.50 | Vitamin E acetate | Tocopheryl Acetate |
| | 1.00 | Ganex V-220 | VP/Eicosene Copolymer |
| | 2.50 | T-Lite SF | Titanium Dioxide, Alumina Hydrate, |
| | | | Dimethicone/Methicone Copolymer |
| C | 5.00 | Glycerin 87% | Glycerin |
| | 2.00 | Lanette E | Sodium Cetearyl Sulfate |
| | 0.30 | Keltrol | Xanthan Gum |
| | 1.00 | Pationic 138 C | Sodium Lauroyl Lactylate |
| | 1.00 | Pationic SSL | Sodium Stearoyl Lactylate |
| | 42.00 | Water demin. | Aqua dem. |
| D | 5.00 | Eusolex 232 | Phenylbenzimidazole Sulfonic Acid |
| | 10.00 | Water demin. | Aqua dem. |
| E | 0.70 | Sodium hydroxide | Sodium Hydroxide |
| | 1% | Fusion protein-KBD | |
| | q.s. | Preservative | |

| | | | |
|---|---|---|---|
| A | 5.00 | Cosmacol EMI | Di-C12-13 Alkyl Malate |
| | 4.50 | Uvinul MC 80 | Ethylhexyl Methoxycinnamate |
| | 3.00 | Uvinul N 539 T | Octocrylene |
| | 2.00 | Uvinul A Plus | Diethylamino Hydrobenzoyl Hexyl |
| | | | Benzoate |
| B | 4.00 | Tego Care 450 | Polyglyceryl-3 Methyl Glucose |
| | | | Distearate |
| | 5.00 | Isohexadecane | Isohexadecane |
| | 3.50 | Cetiol SN | Cetearyl Isononanoate |
| | 0.50 | Vitamin E acetate | Tocopheryl Acetate |
| | 1.00 | Ganex V-220 | VP/Eicosene Copolymer |
| | 2.50 | T-Lite SF | Titanium Dioxide, Alumina Hydrate, |
| | | | Dimethicone/Methicone Copolymer |
| C | 5.00 | Glycerin 87% | Glycerin |
| | 2.00 | Lanette E | Sodium Cetearyl Sulfate |
| | 0.30 | Keltrol | Xanthan Gum |
| | 1.00 | Pationic 138 C | Sodium Lauroyl Lactylate |
| | 1.00 | Pationic SSL | Sodium Stearoyl Lactylate |
| | 41.00 | Water demin. | Aqua dem. |
| D | 5.00 | Eusolex 232 | Phenylbenzimidazole Sulfonic Acid |
| | 2% | Fusion protein-KED | |
| | 10.00 | Water demin. | Aqua dem. |
| E | 0.7 | Sodium hydroxide | Sodium Hydroxide |
| | q.s. | Preservative | |

| | | | |
|---|---|---|---|
| A | 5.00 | Cosmacol EMI | Di-C12-13 Alkyl Malate |
| | 4.50 | Uvinul MC 80 | Ethylhexyl Methoxycinnamate |
| | 3.00 | Uvinul N 539 T | Octocrylene |
| | 2.00 | Uvinul A Plus | Diethylamino Hydrobenzoyl Hexyl |
| | | | Benzoate |
| B | 4.00 | Tego Care 450 | Polyglyceryl-3 Methyl Glucose |
| | | | Distearate |
| | 5.00 | Isohexadecane | Isohexadecane |
| | 3.50 | Cetiol SN | Cetearyl Isononanoate |
| | 0.50 | Vitamin E acetate | Tocopheryl Acetate |
| | 1.00 | Ganex V-220 | VP/Eicosene Copolymer |
| | 2.50 | Z-COTE MAX | Zinc Oxide (And) Diphenyl Capryl |
| | | | Methicone |
| C | 5.00 | Glycerin 87% | Glycerin |
| | 2.00 | Lanette E | Sodium Cetearyl Sulfate |
| | 0.3 | Keltrol | Xanthan Gum |
| | 1.00 | Pationic 138 C | Sodium Lauroyl Lactylate |
| | 1.00 | Pationic SSL | Sodium Stearoyl Lactylate |
| | 42.50 | Water demin. | Aqua dem. |
| D | 5.00 | Eusolex 232 | Phenylbenzimidazole Sulfonic Acid |
| | 0.5% | Fusion protein-KBD | |
| | 10.00 | Water demin. | Aqua dem. |
| E | 0.70 | Sodium hydroxide | Sodium Hydroxide |
| | q.s. | Preservative | |

| | | | |
|---|---|---|---|
| A | 5.00 | Cosmacol EMI | Di-C12-13 Alkyl Malate |
| | 7.50 | Uvinul N 539 T | Octocrylene |
| | 2.00 | Mexoryl XL | Drometrizole Trisiloxane |
| B | 4.00 | Tego Care 450 | Polyglyceryl-3 Methyl Glucose |
| | | | Distearate |
| | 5.00 | Isohexadecane | Isohexadecane |
| | 3.50 | Cetiol SN | Cetearyl Isononanoate |
| | 0.50 | Vitamin E acetate | Tocopheryl Acetate |
| | 1.00 | Ganex V-220 | VP/Eicosene Copolymer |
| | 5.00 | Z-COTE MAX | Zinc Oxide (And) Diphenyl Capryl |
| | | | Methicone |
| C | 5.00 | Glycerin 87% | Glycerin |
| | 2.00 | Lanette E | Sodium Cetearyl Sulfate |
| | 0.30 | Keltrol | Xanthan Gum |
| | 1.00 | Pationic 138 C | Sodium Lauroyl Lactylate |
| | 1.00 | Pationic SSL | Sodium Stearoyl Lactylate |
| | 40.50 | Water demin. | Aqua dem. |
| D | 5.00 | Eusolex 232 | Phenylbenzimidazole Sulfonic Acid |
| | 1% | Fusion protein-KBD | |
| | 10.00 | Water demin. | Aqua dem. |
| E | 0.70 | Sodium hydroxide | Sodium Hydroxide |
| | q.s. | Preservative | |

| | | | |
|---|---|---|---|
| A | 5.00 | Cosmacol EMI | Di-C12-13 Alkyl Malate |
| | 5.50 | Uvinul N 539 T | Octocrylene |
| | 2.00 | Uvinul A Plus | Diethylamino Hydrobenzoyl Hexyl |
| | | | Benzoate |
| | 2.00 | Mexoryl XL | Drometrizole Trisiloxane |
| B | 4.00 | Tego Care 450 | Polyglyceryl-3 Methyl Glucose |
| | | | Distearate |
| | 5.00 | Isohexadecane | Isohexadecane |
| | 3.50 | Cetiol SN | Cetearyl Isononanoate |
| | 0.50 | Vitamin E acetate | Tocopheryl Acetate |
| | 1.00 | Ganex V-220 | VP/Eicosene Copolymer |
| | 5.00 | Z-COTE MAX | Zinc Oxide (And) Diphenyl Capryl |
| | | | Methicone |
| C | 5.00 | Glycerin 87% | Glycerin |
| | 2.00 | Lanette E | Sodium Cetearyl Sulfate |
| | 0.30 | Keltrol | Xanthan Gum |
| | 1.00 | Pationic 138 C | Sodium Lauroyl Lactylate |
| | 1.00 | Pationic SSL | Sodium Stearoyl Lactylate |
| | 41.50 | Water demin. | Aqua dem. |
| D | 5.00 | Eusolex 232 | Phenylbenzimidazole Sulfonic Acid |
| | 0.5% | Fusion protein-KBD | |
| | 9.50 | Water demin. | Aqua dem. |
| E | 0.70 | Sodium hydroxide | Sodium Hydroxide |
| | q.s. | Preservative | |

| | | | |
|---|---|---|---|
| A | 5.00 | Cosmacol EMI | Di-C12-13 Alkyl Malate |
| | 5.50 | Uvinul N 539 T | Octocrylene |
| | 2.00 | Uvinul A Plus | Diethylamino Hydrobenzoyl Hexyl |
| | | | Benzoate |
| | 2.00 | Mexoryl XL | Drometrizole Trisiloxane |
| B | 4.00 | Tego Care 450 | Polyglyceryl-3 Methyl Glucose |
| | | | Distearate |
| | 5.00 | Isohexadecane | Isohexadecane |
| | 3.50 | Cetiol SN | Cetearyl Isononanoate |
| | 0.50 | Vitamin E acetate | Tocopheryl Acetate |
| | 1.00 | Ganex V-220 | VP/Eicosene Copolymer |
| | 5.00 | T-Lite SF-S | Titanium Dioxide, Silica Hydrate, |
| | | | Alumina Hydrate, |
| | | | Methicone/Dimethicone Copolymer |
| C | 5.00 | Glycerin 87% | Glycerin |
| | 2.00 | Lanette E | Sodium Cetearyl Sulfate |
| | 0.30 | Keltrol | Xanthan Gum |
| | 1.00 | Pationic 138 C | Sodium Lauroyl Lactylate |
| | 1.00 | Pationic SSL | Sodium Stearoyl Lactylate |
| | 40.50 | Water demin. | Aqua dem. |
| D | 5.00 | Eusolex 232 | Phenylbenzimidazole Sulfonic Acid |
| | 1% | Fusion protein-KBD | |
| | 10.00 | Water demin. | Aqua dem. |
| E | 0.70 | Sodium hydroxide | Sodium Hydroxide |
| | q.s. | Preservative | |

| | | | |
|---|---|---|---|
| A | 8.00 | Cetiol B | Dibutyl Adipate |
| | 8.00 | Finsolv TN | C12-15 Alkyl Benzoate |
| | 10.00 | Myritol 331 | Cocoglycerides |
| | 1.00 | Lanette E | Sodium Cetearyl Sulfate |
| | 4.00 | Eumulgin VL 75 | Lauryl Glucoside, Polyglyceryl-2 |
| | | | Dipolyhydroxystearate, Glycerin |
| | 2.00 | Lanette O | Cetearyl Alcohol |
| | 1.00 | Tinosorb S | Bis-Ethylhexyloxyphenol |
| | | | Methoxyphenyl Triazine |
| | 1.00 | Uvinul T 150 | Ethylhexyl Triazone |
| | 1.00 | Vitamin E acetate | Tocopheryl Acetate |
| B | 5.00 | T-Lite SF | Titanium Dioxide, Alumina Hydrate, |
| | | | Dimethicone/Methicone Copolymer |
| C | 3.00 | Glycerin 87% | Glycerin |
| | 0.05 | Edeta BD | Disodium EDTA |
| | 0.20 | Allantoin | Allantoin |
| | 0.30 | Keltrol | Xanthan Gum |
| | 2% | Fusion protein-KBD | |
| | 1.50 | Veegum Ultra | Magnesium Aluminum Silicate |
| | | ad 100 Water | Aqua dem. |
| | | demin. | |
| D | q.s. | Perfume oil | |
| | q.s. | Preservative | |

| | | | |
|---|---|---|---|
| A | 8.00 | Cetiol B | Dibutyl Adipate |
| | 8.00 | Finsolv TN | C12-15 Alkyl Benzoate |
| | 10.00 | Myritol 331 | Cocoglycerides |
| | 1.00 | Lanette E | Sodium Cetearyl Sulfate |
| | 4.00 | Eumulgin VL 75 | Lauryl Glucoside, Polyglyceryl-2 |
| | | | Dipolyhydroxystearate, Glycerin |
| | 2.00 | Lanette O | Cetearyl Alcohol |
| | 1.00 | Tinosorb S | Bis-Ethylhexyloxyphenol |
| | | | Methoxyphenyl triazine |
| | 1.00 | Uvinul T 150 | Ethylhexyl Triazone |
| | 1.00 | Vitamin E acetate | Tocopheryl Acetate |
| B | 5.00 | Z-COTE MAX | Zinc Oxide (and) Diphenyl Capryl |
| | | | Methicone |
| C | 3.00 | Glycerin 87% | Glycerin |
| | 0.05 | Edeta BD | Disodium EDTA |
| | 0.20 | Allantoin | Allantoin |
| | 0.30 | Keltrol | Xanthan Gum |
| | 1% | Fusion protein-KBD | |
| | 1.50 | Veegum Ultra | Magnesium Aluminum Silicate |
| | | ad 100 Water demin. | Aqua dem. |
| D | q.s. | Perfume oil | |
| | q.s. | Preservative | |

| | | | |
|---|---|---|---|
| A | 3.00 | Glycerin 87% | Glycerin |
| | 0.20 | Edeta BD | Disodium EDTA |
| | 0.30 | Abiol | Imidazolidinyl Urea |
| | 1.00 | Plantacare 2000 | Decyl Glucoside |
| | 0.30 | Keltrol T | Xanthan Gum |
| | 57.00 | Water demin. | Aqua dem. |
| B | 5.00 | T-Lite SF-S | Titanium Dioxide, Silica Hydrate, |
| | | | Alumina Hydrate, |
| | | | Methicone/Dimethicone Copolymer |
| C | 7.50 | Uvinul MC 80 | Ethylhexyl Methoxycinnamate |
| | 2.00 | Uvinul A Plus | Diethylamino Hydroxybenzoyl |
| | | | Hexyl Benzoate |
| | 2.00 | Dow Corning 345 | Cyclopentasiloxane, |
| | | Fluid | Cyclohexasiloxane |
| | 3.50 | Cremophor A 6 | Ceteareth-6, Stearyl Alcohol |
| | 1.50 | Cremophor A 25 | Ceteareth-25 |
| | 0.50 | Beeswax 3044 PH | Beeswax |
| | 3.00 | Lanette O | Cetearyl Alcohol |
| | 10.00 | Miglyol 812 | Caprylic/Capric Triglyceride |
| D | 1.00 | Vitamin E acetate | Tocopheryl Acetate |
| | 2% | Fusion protein-KBD | |
| | 0.20 | Bisabolol rac. | Bisabolol |

| | | | |
|---|---|---|---|
| A | 3.00 | Glycerin 87% | Glycerin |
| | 0.20 | Edeta BD | Disodium EDTA |
| | 0.30 | Abiol | Imidazolidinyl Urea |
| | 1.00 | Plantacare 2000 | Decyl Glucoside |
| | 0.30 | Keltrol T | Xanthan Gum |
| | 58.00 | Water demin. | Aqua dem. |
| B | 5.00 | Z-COTE MAX | Zinc Oxide (and) Diphenyl Capryl |
| | | | Methicone |
| C | 7.50 | Uvinul MC 80 | Ethylhexyl Methoxycinnamate |
| | 2.00 | Uvinul A Plus | Diethylamino Hydroxybenzoyl |
| | | | Hexyl Benzoate |
| | 2.00 | Dow Corning 345 | Cyclopentasiloxane, |
| | | Fluid | Cyclohexasiloxane |
| | 3.50 | Cremophor A 6 | Ceteareth-6, Stearyl Alcohol |
| | 1.50 | Cremophor A 25 | Ceteareth-25 |
| | 0.50 | Beeswax 3044 PH | Beeswax |
| | 3.00 | Lanette O | Cetearyl Alcohol |
| | 10.00 | Miglyol 812 | Caprylic/Capric Triglyceride |
| D | 1.00 | Vitamin E acetate | Tocopheryl Acetate |
| | 1% | Fusion protein-KBD | |
| | 0.20 | Bisabolol rac. | Bisabolol |

| | | | |
|---|---|---|---|
| A | 3.00 | Glycerin 87% | Glycerin |
| | 0.20 | Edeta BD | Disodium EDTA |
| | 0.30 | Abiol | Imidazolidinyl Urea |
| | 1.00 | Plantacare 2000 | Decyl Glucoside |
| | 0.30 | Keltrol T | Xanthan Gum |
| | 58.50 | Water demin. | Aqua dem. |
| B | 5.00 | T-Lite SF-S | Titanium Dioxide, Silica Hydrate, |
| | | | Alumina Hydrate, |
| | | | Methicone/Dimethicone Copolymer |
| C | 7.50 | Uvinul MC 80 | Ethylhexyl Methoxycinnamate |
| | 5.00 | Uvinul N 539 T | Octocrylene |
| | 2.00 | Parsol 1789 | Butyl Methoxydibenzoylmethane |
| | 2.00 | Dow Corning 345 | Cyclopentasiloxane, |
| | | Fluid | Cyclohexasiloxane |
| | 3.50 | Cremophor A 6 | Ceteareth-6, Stearyl Alcohol |
| | 1.50 | Cremophor A 25 | Ceteareth-25 |
| | 0.50 | Beeswax 3044 PH | Beeswax |
| | 3.00 | Lanette O | Cetearyl Alcohol |
| | 10.00 | Miglyol 812 | Caprylic/Capric Triglyceride |
| D | 1.00 | Vitamin E acetate | Tocopheryl Acetate |
| | 0.5% | Fusion protein-KBD | |
| | 0.20 | Bisabolol rac. | Bisabolol |

| | | | |
|---|---|---|---|
| A | 3.00 | Glycerin 87% | Glycerin |
| | 0.20 | Edeta BD | Disodium EDTA |
| | 0.30 | Abiol | Imidazolidinyl Urea |
| | 1.00 | Plantacare 2000 | Decyl Glucoside |
| | 0.30 | Keltrol T | Xanthan Gum |
| | 2.00 | Mexoryl SL | Terephthalidene Dicamphor |
| | | | Sulfonic Acid |
| | 58.40 | Water demin. | Aqua dem. |
| B | 6.00 | T-Lite SF-S | Titanium Dioxide, Silica Hydrate, |
| | | | Alumina Hydrate, |
| | | | Methicone/Dimethicone Copolymer |
| | 6.00 | Uvinul N 539 T | Octocrylene |
| | 2.00 | Parsol 1789 | Butyl Methoxydibenzoylmethane |
| | 2.00 | Dow Corning 345 | Cyclopentasiloxane, |
| | | Fluid | Cyclohexasiloxane |
| | 3.50 | Cremophor A 6 | Ceteareth-6, Stearyl Alcohol |
| | 1.50 | Cremophor A 25 | Ceteareth-25 |
| | 0.50 | Beeswax 3044 PH | Beeswax |
| | 3.00 | Lanette O | Cetearyl Alcohol |
| | 10.00 | Miglyol 812 | Caprylic/Capric Triglyceride |
| D | 1.00 | Vitamin E acetate | Tocopheryl Acetate |
| | 0.1% | Fusion protein-KBD | |
| | 0.20 | Bisabolol rac. | Bisabolol |

| | | | |
|---|---|---|---|
| A | 3.00 | Glycerin 87% | Glycerin |
| | 0.20 | Edeta BD | Disodium EDTA |
| | 0.30 | Abiol | Imidazolidinyl Urea |
| | 1.00 | Plantacare 2000 | Decyl Glucoside |
| | 0.30 | Keltrol T | Xanthan Gum |
| | 2.00 | Mexoryl SL | Terephthalidene Dicamphor |
| | | | Sulfonic Acid |
| | 58.45 | Water demin. | Aqua dem. |
| B | 6.00 | Z-COTE MAX | Zinc Oxide (and) Diphenyl Capryl |
| | | | Methicone |
| | 6.00 | Uvinul N 539 T | Octocrylene |
| | 2.00 | Parsol 1789 | Butyl Methoxydibenzoylmethane |
| | 2.00 | Dow Corning 345 | Cyclopentasiloxane, |
| | | Fluid | Cyclohexasiloxane |
| | 3.50 | Cremophor A 6 | Ceteareth-6, Stearyl Alcohol |
| | 1.50 | Cremophor A 25 | Ceteareth-25 |
| | 0.50 | Beeswax 3044 PH | Beeswax |
| | 3.00 | Lanette O | Cetearyl Alcohol |
| | 10.00 | Miglyol 812 | Caprylic/Capric Triglyceride |
| D | 1.00 | Vitamin E acetate | Tocopheryl Acetate |
| | 0.05% | Fusion protein-KBD | |
| | 0.20 | Bisabolol rac. | Bisabolol |

| | | | |
|---|---|---|---|
| A | 3.00 | Glycerin 87% | Glycerin |
| | 0.20 | Edeta BD | Disodium EDTA |
| | 0.30 | Abiol | Imidazolidinyl Urea |
| | 1.00 | Plantacare 2000 | Decyl Glucoside |
| | 0.30 | Keltrol T | Xanthan Gum |
| | 2.00 | Neoheliopan AP | Disodium Phenyl Dibenzimidazole |
| | | | Tetrasulfonate |
| | 57.50 | Water demin. | Aqua dem. |
| B | 6.00 | Z-COTE MAX | Zinc Oxide (and) Diphenyl Capryl |
| | | | Methicone |
| | 6.00 | Uvinul N 539 T | Octocrylene |
| | 2.00 | Parsol 1789 | Butyl Methoxydibenzoylmethane |
| | 2.00 | Dow Corning 345 | Cyclopentasiloxane, |
| | | Fluid | Cyclohexasiloxane |
| | 3.50 | Cremophor A 6 | Ceteareth-6, Stearyl Alcohol |
| | 1.50 | Cremophor A 25 | Ceteareth-25 |
| | 0.50 | Beeswax 3044 PH | Beeswax |
| | 3.00 | Lanette O | Cetearyl Alcohol |
| | 10.00 | Miglyol 812 | Caprylic/Capric Triglyceride |
| D | 1.00 | Vitamin E acetate | Tocopheryl Acetate |
| | 1.0% | Fusion protein-KBD | |
| | 0.20 | Bisabolol rac. | Bisabolol |

| | | | |
|---|---|---|---|
| A | 25.00 | Dow Corning 345 | Cyclopentasiloxane, |
| | | Fluid | Cyclohexasiloxane |
| | 20.00 | Dow Corning 245 | Cyclopentasiloxane |
| | | Fluid | |
| | 8.00 | Uvinul MC 80 | Ethylhexyl Methoxycinnamate |
| | 4.00 | Abil EM 90 | Cetyl PEG/PPG-10/1 Dimethicone |
| | 7.00 | T-Lite SF | Titanium Dioxide, Alumina Hydrate, |
| | | | Dimethicone/Methicone Copolymer |
| B | 17.00 | Ethanol 95% | Alcohol |
| | 10.00 | Z-COTE MAX | Zinc Oxide (and) Diphenyl Capryl |
| | | | Methicone |
| | 4.50 | Water demin. | Aqua dem. |
| | 3.00 | Glycerin 87% | Glycerin |
| | 0.5% | Fusion protein-KBD | |
| | 1.00 | talc | Talc |

| | | | |
|---|---|---|---|
| A | 25.00 | Dow Corning 345 | Cyclopentasiloxane, |
| | | Fluid | Cyclohexasiloxane |
| | 20.00 | Dow Corning 245 | Cyclopentasiloxane |
| | | Fluid | |
| | 8.00 | Uvinul MC 80 | Ethylhexyl Methoxycinnamate |
| | 4.00 | Abil EM 90 | Cetyl PEG/PPG-10/1 Dimethicone |
| | 7.00 | T-Lite SF-S | Titanium Dioxide, Silica Hydrate, |
| | | | Alumina Hydrate, |
| | | | Methicone/Dimethicone Copolymer |
| B | 17.00 | Ethanol 95% | Alcohol |
| | 9.99 | Z-COTE MAX | Zinc Oxide (and) Diphenyl Capryl |
| | | | Methicone |
| | 5.00 | Water demin. | Aqua dem. |
| | 3.00 | Glycerin 87% | Glycerin |
| | 0.01% | Fusion protein-KBD | |
| | 1.00 | talc | Talc |

| | | | |
|---|---|---|---|
| A | 20.00 | Dow Corning 345 | Cyclopentasiloxane, |
| | | Fluid | Cyclohexasiloxane |
| | 10.00 | Dow Corning 245 | Cyclopentasiloxane |
| | | Fluid | |
| | 7.50 | Uvinul MC 80 | Ethylhexyl Methoxycinnamate |
| | 2.00 | Uvinul T 150 | Ethylhexyl Triazone |
| | 12.00 | Cosmacol EMI | Di-C12-13 Alkyl Malate |
| | 4.00 | Abil EM 90 | Cetyl PEG/PPG-10/1 Dimethicone |
| B | 7.00 | T-Lite SF | Titanium Dioxide, Alumina Hydrate, |
| | | | Dimethicone/Methicone Copolymer |
| C | 15.00 | Ethanol 95% | Alcohol |
| | 10.00 | Z-COTE MAX | Zinc Oxide (and) Diphenyl Capryl |
| | | | Methicone |
| | 3.00 | Glycerin 87% | Glycerin |
| | 1.5% | Fusion protein-KBD | |
| | 8.00 | Water demin. | Aqua dem. |

| | | | |
|---|---|---|---|
| A | 20.00 | Dow Corning 345 | Cyclopentasiloxane, |
| | | Fluid | Cyclohexasiloxane |
| | 10.00 | Dow Corning 245 | Cyclopentasiloxane |
| | | Fluid | |
| | 7.50 | Uvinul MC 80 | Ethylhexyl Methoxycinnamate |
| | 2.00 | Tinosorb S | Bis-Ethylhexyloxyphenol |
| | | | Methoxyphenyl Triazine |
| | 12.00 | Cosmacol EMI | Di-C12-13 Alkyl Malate |
| | 4.00 | Abil EM 90 | Cetyl PEG/PPG-10/1 Dimethicone |
| B | 7.00 | T-Lite SF | Titanium Dioxide, Alumina Hydrate, |
| | | | Dimethicone/Methicone Copolymer |
| C | 15.00 | Ethanol 95% | Alcohol |
| | 10.00 | Z-COTE MAX | Zinc Oxide (and) Diphenyl Capryl |
| | | | Methicone |
| | 3.00 | Glycerin 87% | Glycerin |
| | 0.5% | Fusion protein-KBD | |
| | 9.00 | Water demin. | Aqua dem. |

| | | | |
|---|---|---|---|
| A | 2.00 | Cremophor WO 7 | PEG-7 Hydrogenated Castor Oil |
| | 6.00 | Abil B 8839 | Cyclopentasiloxane, |
| | | | Cyclohexasiloxane |
| | 3.00 | T-Lite SF | Titanium Dioxide, Alumina Hydrate, |
| | | | Dimethicone/Methicone Copolymer |
| | 4.00 | Isopropyl Palmitate | Isopropyl Palmitate |
| | 1.00 | Abil 350 | Dimethicone |
| B | 7.00 | Uvinul MC 80 | Ethylhexyl Methoxycinnamate |
| | 1.00 | Uvinul T 150 | Ethylhexyl Triazone |
| | 7.00 | Finsolv TN | C12-15 Alkyl Benzoate |
| | 4.00 | Abil WE 09 | Polyglyceryl-4 Isostearate, Cetyl |
| | | | PEG/PPG-10/1 Dimethicone, Hexyl |
| | | | Laurate |
| C | 0.50 | Sodium chloride | Sodium Chloride |
| | 0.20 | Edeta BD | Disodium EDTA |
| | 61.30 | Water demin. | Aqua dem. |
| D | 1.00 | Vitamin E acetate | Tocopheryl Acetate |
| | 1% | Fusion protein-KBD | |
| | q.s. | Preservative | |

| | | | |
|---|---|---|---|
| A | 2.00 | Cremophor WO 7 | PEG-7 Hydrogenated Castor Oil |
| | 6.00 | Abil B 8839 | Cyclopentasiloxane, |
| | | | Cyclohexasiloxane |
| | 3.00 | Z-COTE MAX | Zinc Oxide (and) Diphenyl Capryl |
| | | | Methicone |
| | 4.00 | Isopropyl Palmitate | Isopropyl Palmitate |
| | 1.00 | Abil 350 | Dimethicone |
| B | 7.00 | Uvinul MC 80 | Ethylhexyl Methoxycinnamate |
| | 1.00 | Uvinul T 150 | Ethylhexyl Triazone |
| | 7.00 | Finsolv TN | C12-15 Alkyl Benzoate |
| | 4.00 | Abil WE 09 | Polyglyceryl-4 Isostearate, Cetyl |
| | | | PEG/PPG-10/1 Dimethicone, Hexyl |
| | | | Laurate |
| C | 0.50 | Sodium chloride | Sodium Chloride |
| | 0.20 | Edeta BD | Disodium EDTA |
| | 62.20 | Water demin. | Aqua dem. |
| D | 1.00 | Vitamin E acetate | Tocopheryl Acetate |
| | 0.1% | Fusion protein-KBD | |
| | q.s. | Preservative | |

| | | | |
|---|---|---|---|
| A | 2.00 | Cremophor WO 7 | PEG-7 Hydrogenated Castor Oil |
| | 6.00 | Abil B 8839 | Cyclopentasiloxane, |
| | | | Cyclohexasiloxane |
| | 3.00 | Z-COTE MAX | Zinc Oxide (and) Diphenyl Capryl |
| | | | Methicone |
| | 4.00 | Isopropyl Palmitate | Isopropyl Palmitate |
| | 1.00 | Abil 350 | Dimethicone |
| B | 7.00 | Uvinul MC 80 | Ethylhexyl Methoxycinnamate |
| | 1.00 | Tinosorb S | Bis-Ethylhexyloxyphenol |
| | | | Methoxyphenyl Triazine |
| | 7.00 | Finsolv TN | C12-15 Alkyl Benzoate |
| | 4.00 | Abil WE 09 | Polyglyceryl-4 Isostearate, Cetyl |
| | | | PEG/PPG-10/1 Dimethicone, Hexyl |
| | | | Laurate |
| C | 0.50 | Sodium chloride | Sodium Chloride |
| | 0.20 | Edeta BD | Disodium EDTA |
| | 60.30 | Water demin. | Aqua dem. |
| D | 1.00 | Vitamin E acetate | Tocopheryl Acetate |
| | 2% | Fusion protein-KBD | |
| | q.s. | Preservative | |

| | | | |
|---|---|---|---|
| A | 2.00 | Cremophor WO 7 | PEG-7 Hydrogenated Castor Oil |
| | 6.00 | Abil B 8839 | Cyclopentasiloxane, |
| | | | Cyclohexasiloxane |
| | 6.00 | Z-COTE MAX | Zinc Oxide (and) Diphenyl Capryl |
| | | | Methicone |
| | 4.00 | Isopropyl Palmitate | Isopropyl Palmitate |
| | 1.00 | Abil 350 | Dimethicone |
| B | 4.00 | Uvinul N 539 T | Octocrylene |
| | 1.00 | Tinosorb S | Bis-Ethylhexyloxyphenol |
| | | | Methoxyphenyl Triazine |
| | 7.00 | Finsolv TN | C12-15 Alkyl Benzoate |
| | 4.00 | Abil WE 09 | Polyglyceryl-4 Isostearate, Cetyl |
| | | | PEG/PPG-10/1 Dimethicone, Hexyl |
| | | | Laurate |
| C | 0.50 | Sodium chloride | Sodium Chloride |
| | 0.20 | Edeta BD | Disodium EDTA |
| | 62.10 | Water demin. | Aqua dem. |
| D | 1.00 | Vitamin E acetate | Tocopheryl Acetate |
| | 0.2% | Fusion protein-KBD | |
| | q.s. | Preservative | |

| | | | |
|---|---|---|---|
| A | 2.00 | Cremophor WO 7 | PEG-7 Hydrogenated Castor Oil |
| | 6.00 | Abil B 8839 | Cyclopentasiloxane, |
| | | | Cyclohexasiloxane |
| | 6.00 | Z-COTE MAX | Zinc Oxide (and) Diphenyl Capryl |
| | | | Methicone |
| | 4.00 | Isopropyl Palmitate | Isopropyl Palmitate |
| | 1.00 | Abil 350 | Dimethicone |
| B | 3.00 | Uvinul N 539 T | Octocrylene |
| | 1.00 | Mexoryl XL | Drometrizole Trisiloxane |
| | 1.00 | Tinosorb S | Bis-Ethylhexyloxyphenol |
| | | | Methoxyphenyl Triazine |
| | 7.00 | Finsolv TN | C12-15 Alkyl Benzoate |
| | 4.00 | Abil WE 09 | Polyglyceryl-4 Isostearate, Cetyl |
| | | | PEG/PPG-10/1 Dimethicone, Hexyl |
| | | | Laurate |
| C | 0.50 | Sodium chloride | Sodium Chloride |
| | 0.20 | Edeta BD | Disodium EDTA |
| | 1% | Fusion protein-KBD | |
| | 61.30 | Water demin. | Aqua dem. |
| D | 1.00 | Vitamin E acetate | Tocopheryl Acetate |
| | q.s. | Preservative | |

| | | | |
|---|---|---|---|
| A | 2.00 | Cremophor WO 7 | PEG-7 Hydrogenated Castor Oil |
| | 6.00 | Abil B 8839 | Cyclopentasiloxane, |
| | | | Cyclohexasiloxane |
| | 6.00 | T-Lite SF-S | Titanium Dioxide, Silica Hydrate, |
| | | | Alumina Hydrate, |
| | | | Methicone/Dimethicone Copolymer |
| | 4.00 | Isopropyl Palmitate | Isopropyl Palmitate |
| | 1.00 | Abil 350 | Dimethicone |
| B | 3.00 | Uvinul N 539 T | Octocrylene |
| | 1.00 | Mexoryl XL | Drometrizole trisiloxane |
| | 1.00 | Tinosorb S | Bis-Ethylhexyloxyphenol |
| | | | Methoxyphenyl Triazine |
| | 7.00 | Finsolv TN | C12-15 Alkyl Benzoate |
| | 4.00 | Abil WE 09 | Polyglyceryl-4 Isostearate, Cetyl |
| | | | PEG/PPG-10/1 Dimethicone, Hexyl |
| | | | Laurate |
| C | 0.50 | Sodium chloride | Sodium Chloride |
| | 0.20 | Edeta BD | Disodium EDTA |
| | 61.80 | Water demin. | Aqua dem. |
| D | 1.00 | Vitamin E acetate | Tocopheryl Acetate |
| | 0.5% | Fusion protein-KBD | |
| | q.s. | Preservative | |

| | | | |
|---|---|---|---|
| A | 4.50 | Uvinul MC 80 | Ethylhexyl Methoxycinnamate |
| | 3.00 | Uvinul N 539 T | Octocrylene |
| | 1.00 | Uvinul T 150 | Ethylhexyl Triazone |
| | 2.50 | Cosmacol EMI | Di-C12-13 Alkyl Malate |
| B | 0.50 | Vitamin E acetate | Tocopheryl Acetate |
| | 4.00 | Tego Care 450 | Polyglyceryl-3 Methyl Glucose |
| | | | Distearate |
| C | 3.50 | Cetiol SN | Cetearyl Isononanoate |
| | 1.00 | Ganex V-220 | VP/Eicosene Copolymer |
| | 5.00 | Isohexadecane | Isohexadecane |
| | 2.50 | Cosmacol EMI | Di-C12-13 Alkyl Malate |
| | 5.00 | Z-COTE MAX | Zinc Oxide (and) Diphenyl Capryl |
| | | | Methicone |
| D | 44.00 | Water demin. | Aqua dem. |
| | 5.00 | Glycerin 87% | Glycerin |
| | 1.00 | Lanette E | Sodium Cetearyl Sulfate |
| | 15.00 | Luviquat Care | Polyquaternium-44 |
| | 1% | Fusion protein-KBD | |
| | 0.50 | Keltrol | Xanthan Gum |
| E | 1.00 | Phenonip | |

| | | | |
|---|---|---|---|
| A | 4.50 | Uvinul MC 80 | Ethylhexyl Methoxycinnamate |
| | 3.00 | Uvinul N 539 T | Octocrylene |
| | 1.00 | Tinosorb S | Bis-Ethoxylhexyloxyphenol |
| | | | Methoxyphenyl Triazine |
| | 2.50 | Cosmacol EMI | Di-C12-13 Alkyl Malate |
| B | 0.50 | Vitamin E acetate | Tocopheryl Acetate |
| | 4.00 | Tego Care 450 | Polyglyceryl-3 Methyl Glucose |
| | | | Distearate |
| C | 3.50 | Cetiol SN | Cetearyl Isononanoate |
| | 1.00 | Ganex V-220 | VP/Eicosene Copolymer |
| | 5.00 | Isohexadecane | Isohexadecane |
| | 2.50 | Cosmacol EMI | Di-C12-13 Alkyl Malate |
| | 5.00 | Z-COTE MAX | Zinc Oxide (and) Diphenyl Capryl |
| | | | Methicone |
| D | 44.90 | Water demin. | Aqua dem. |
| | 5.00 | Glycerin 87% | Glycerin |
| | 1.00 | Lanette E | Sodium Cetearyl Sulfate |
| | 15.00 | Luviquat Care | Polyquaternium-44 |
| | 0.1% | Fusion protein-KBD | |
| | 0.50 | Keltrol | Xanthan Gum |
| E | 1.00 | Phenonip | |

| | | | |
|---|---|---|---|
| A | 1.50 | Mexoryl XL | Drometrizole Trisiloxane |
| | 5.00 | Uvinul N 539 T | Octocrylene |
| | 1.00 | Tinosorb S | Bis-Ethylhexyloxyphenol |
| | | | Methoxyphenyl Triazine |
| | 2.50 | Cosmacol EMI | Di-C12-13 Alkyl Malate |
| B | 0.50 | Vitamin E acetate | Tocopheryl Acetate |
| | 4.00 | Tego Care 450 | Polyglyceryl-3 Methyl Glucose |
| | | | Distearate |
| C | 3.50 | Cetiol SN | Cetearyl Isononanoate |
| | 1.00 | GanexV-220 | VP/Eicosene Copolymer |
| | 5.00 | Isohexadecane | Isohexadecane |
| | 2.50 | Cosmacol EMI | Di-C12-13 Alkyl Malate |
| | 5.00 | Z-COTE MAX | Zinc Oxide (and) Diphenyl |
| | | | Capryl Methicone |
| D | 44.50 | Water demin. | Aqua dem. |
| | 5.00 | Glycerin 87% | Glycerin |
| | 1.00 | Lanette E | Sodium Cetearyl Sulfate |
| | 15.00 | Luviquat Care | Polyquaternium-44 |
| | 1.5% | Fusion protein-KBD | |
| | 0.50 | Keltrol | Xanthan Gum |
| E | 1.00 | Phenonip | |

| | | | |
|---|---|---|---|
| A | 1.50 | Mexoryl XL | Drometrizole Trisiloxane |
| | 5.00 | Uvinul N 539 T | Octocrylene |
| | 1.00 | Tinosorb S | Bis-Ethylhexyloxyphenol |
| | | | Methoxyphenyl Triazine |
| | 2.50 | Cosmacol EMI | Di-C12-13 Alkyl Malate |
| B | 0.50 | Vitamin E acetate | Tocopheryl Acetate |
| | 4.00 | Tego Care 450 | Polyglyceryl-3 Methyl Glucose |
| | | | Distearate |
| C | 3.50 | Cetiol SN | Cetearyl Isononanoate |
| | 1.00 | Ganex V-220 | VP/Eicosene Copolymer |
| | 5.00 | Isohexadecane | Isohexadecane |
| | 2.50 | Cosmacol EMI | Di-C12-13 Alkyl Malate |
| | 5.00 | T-Lite SF | Titanium Dioxide, Alumina Hydrate, |
| | | | Dimethicone/Methicone Copolymer |
| D | 45.00 | Water demin. | Aqua dem. |
| | 5.00 | Glycerin 87% | Glycerin |
| | 1.00 | Lanette E | Sodium Cetearyl Sulfate |
| | 15.00 | Luviquat Care | Polyquaternium-44 |
| | 1% | Fusion protein-KBD | |
| | 0.50 | Keltrol | Xanthan Gum |
| E | 1.00 | Phenonip | |

| | | | |
|---|---|---|---|
| A | 1.00 | Abil Care 85 | Bis-PEG/PPG-16/16 PEG/PPG-16/16 |
| | | | Dimethicone, Caprylic/Capric |
| | | | Triglyceride |
| | 3.00 | Cremophor CO 40 | PEG-40 Hydrogenated Castor Oil |
| | 0.30 | Cremophor WO 7 | PEG-7 Hydrogenated Castor Oil |
| | 5.00 | Uvinul MC 80 | Ethylhexyl Methoxycinnamate |
| | 10.00 | Witconol APM | PPG-3 Myristyl Ether |
| | 2.00 | Uvinul T 150 | Ethylhexyl Triazone |
| | 1.00 | Dow Corning 345 | Cyclopentasiloxane, |
| | | Fluid | Cyclohexasiloxane |
| | 5.00 | Uvinul N 539 T | Octocrylene |
| B | 5.00 | Z-COTE MAX | Zinc Oxide (and) Diphenyl Capryl |
| | | | Methicone |
| C | 5.00 | 1,2-Propylene | Propylene Glycol |
| | | glycol | |
| | 0.20 | Keltrol | Xanthan Gum |
| | 0.10 | Edeta BD | Disodium EDTA |
| | 2.0% | Fusion protein-KBD | |
| | 1.50 | Simulgel 600 | Acrylamide/Sodium |
| | | | Acryloyldimethyltaurate Copolymer, |
| | | | Isohexadecane, Polysorbate 80 |
| | 58.40 | Water demin. | Aqua dem. |
| D | q.s. | Perfume oil | |
| | 0.50 | Glydant | DMDM Hydantoin |

| | | | |
|---|---|---|---|
| A | 2.00 | Abil Care 85 | Bis-PEG/PPG-16/16 PEG/PPG-16/16 |
| | | | Dimethicone, Caprylic/Capric |
| | | | Triglyceride |
| | 4.00 | Finsolv TN | C12-15 Alkyl Benzoate |
| | 1.50 | Miglyol 812 | Caprylic/Capric Triglyceride |
| | 0.50 | Vitamin E acetate | Tocopheryl Acetate |
| | 7.50 | Uvinul MC 80 | Ethylhexyl Methoxycinnamate |
| | 4.00 | Cetiol B | Dibutyl Adipate |
| | 3.00 | Luvitol EHO | Cetearyl Ethylhexanoate |
| | 1.00 | Cremophor CO 40 | PEG-40 Hydrogenated Castor Oil |
| | 1.00 | Paraffin oil, | Mineral Oil |
| | | low viscosity | |
| | 3.00 | Plantacare 2000 | Decyl Glucoside |
| | 0.50 | Phenonip | |
| | q.s. | Perfume oil | |
| B | 4.00 | Z-COTE MAX | Zinc Oxide (and) Diphenyl Capryl |
| | | | Methicone |
| C | 2.00 | Simulgel NS | Hydroxyethyl Acrylate/Sodium |
| | | | Acryloyldimethyl Taurate Copolymer, |
| | | | Squalane, Polysorbate 60 |
| | 0.20 | Keltrol | Xanthan Gum |
| | 0.10 | Edeta BD | Disodium EDTA |
| | 1% | Fusion protein-KBD | |
| | 64.20 | Water demin. | Aqua dem. |

| | | | |
|---|---|---|---|
| A | 6.00 | Gilugel SIL 5 | Cyclomethicone (and) Aluminum/ |
| | | | Magnesium Hydroxide Stearate |
| | 5.00 | Uvinul MC 80 | Ethylhexyl Methoxycinnamate |
| | 2.00 | Uvinul A Plus | Diethylamino Hydroxybenzoyl |
| | | | Hexyl Benzoate |
| | 1.00 | Uvinul T 150 | Ethylhexyl Triazone |
| | 7.00 | Finsolv TN | C12-15 Alkyl Benzoate |
| | 4.00 | Abil WE 09 | Polyglyceryl-4 Isostearate, |
| | | | Cetyl PEG/PPG-10/1 |
| | | | Dimethicone, Hexyl Laurate |
| | 2.00 | Cosmacol EMI | Di-C12-13 Alkyl Malate |
| | 3.00 | Isopro palmitate | Isopropyl Palmitate |
| | 5.00 | Abil B 8839 | Cyclopentasiloxane, |
| | | | Cyclohexasiloxane |
| | 0.50 | Abil 350 | Dimethicone |
| B | 0.50 | Sodium chloride | Sodium Chloride |
| | 0.20 | Edeta BD | Disodium EDTA |
| | 0.2% | Fusion protein-KBD | |
| | 62.10 | Water demin. | Aqua dem. |
| C | 1.00 | Vitamin E acetate | Tocopheryl Acetate |
| | 0.50 | Phenonip | |

| | | | |
|---|---|---|---|
| A | 4.50 | Uvinul MC 80 | Ethylhexyl Methoxycinnamate |
| | 2.00 | Tinosorb S | Bis-Ethylhexyloxyphenol |
| | | | Methoxyphenyl Triazine |
| | 3.00 | Uvinul N 539 T | Octocrylene |
| | 2.50 | Cosmacol EMI | Di-C12-13 Alkyl Malate |
| | 0.50 | Vitamin E acetate | Tocopheryl Acetate |
| | 4.00 | Tego Care 450 | Polyglyceryl-3 Methyl Glucose |
| | | | Distearate |
| B | 3.50 | Cetiol SN | Cetearyl Isononanoate |
| | 1.00 | Ganex V-220 | VP/Eicosene Copolymer |
| | 5.00 | Isohexadecane | Isohexadecane |
| | 2.50 | Cosmacol EMI | Di-C12-13 Alkyl Malate |
| | 3.00 | T-Lite SF | Titanium Dioxide, Alumina Hydrate, |
| | | | Dimethicone/Methicone Copolymer |
| C | 5.00 | Glycerin 87% | Glycerin |
| | 1.00 | Lanette E | Sodium Cetearyl Sulfate |
| | 0.50 | Keltrol | Xanthan Gum |
| | 1% | Fusion protein-KBD | |
| | 59.70 | Water demin. | Aqua dem. |
| D | 1.00 | Phenonip | |
| | 0.30 | Bisabolol rac. | Bisabolol |

| | | | |
|---|---|---|---|
| A | 2.00 | Abil Care 85 | Bis-PEG/PPG-16/16 PEG/PPG-16/16 |
| | | | Dimethicone, Caprylic/Capric |
| | | | Triglyceride |
| | 4.00 | Finsolv TN | C12-15 Alkyl Benzoate |
| | 1.50 | Miglyol 812 | Caprylic/Capric Triglyceride |
| | 0.50 | Vitamin E acetate | Tocopheryl Acetate |
| | 7.50 | Uvinul MC 80 | Ethylhexyl Methoxycinnamate |
| | 4.00 | Cetiol B | Dibutyl Adipate |
| | 1.00 | Luvitol EHO | Cetearyl Ethylhexanoate |
| | 1.00 | Cremophor CO 40 | PEG-40 Hydrogenated Castor Oil |
| | 1.00 | Paraffin oil, | Mineral Oil |
| | | low viscosity | |
| | 3.00 | Plantacare 2000 | Decyl Glucoside |
| | 1.00 | Uvinul A Plus | Diethylamino Hydroxybenzoyl Hexyl |
| | | | Benzoate |
| | 0.50 | Phenonip | |
| | 2.50 | Uvinul T 150 | Ethylhexyl Triazone |
| | q.s. | Perfume oil | |
| B | 4.00 | Z-COTE MAX | Zinc Oxide (and) Diphenyl Capryl |
| | | | Methicone |
| C | 2.00 | Simulgel NS | Hydroxyethyl Acrylate/Sodium |
| | | | Acryloyldimethyl Taurate |
| | | | Copolymer, Squalane, |
| | | | Polysorbate 60 |
| | 0.10 | Keltrol | Xanthan Gum |
| | 0.10 | Edeta BD | Disodium EDTA |
| | 0.5% | Fusion protein-KBD | |
| | 59.90 | Water demin. | Aqua dem. |

| | | | |
|---|---|---|---|
| A | 4.00 | Eumulgin VL 75 | Lauryl Glucoside, Polyglyceryl-2 |
| | | | Dipolyhydroxystearate, Glycerin |
| | 2.00 | Lanette O | Cetearyl Alcohol |
| | 12.00 | Myritol 331 | Cocoglycerides |
| | 8.00 | Finsolv TN | C12-15 Alkyl Benzoate |
| | 8.00 | Cetiol B | Dibutyl Adipate |
| B | 6.00 | T-Lite SF | Titanium Dioxide, Alumina Hydrate, |
| | | | Dimethicone/Methicone Copolymer |
| | 5.00 | Z-COTE MAX | Zinc Oxide (and) Diphenyl Capryl |
| | | | Methicone |
| C | 3.00 | Glycerin 87% | Glycerin |
| | 0.10 | Edeta BD | Disodium EDTA |
| | 1.50 | Veegum Ultra | Magnesium Aluminum Silicate |
| | 1.50 | Lanette E | Sodium Cetearyl Sulfate |
| | 2% | Fusion protein-KBD | |
| | 0.30 | Keltrol | Xanthan Gum |
| | 45.10 | Water demin. | Water |
| D | 1.00 | Phenonip | Phenoxyethanol, Methylparaben, |
| | | | Ethylparaben, Butylparaben, |
| | | | Propylparaben, Isobutylparaben |

| | | | |
|---|---|---|---|
| A | 4.00 | Eumulgin VL 75 | Lauryl Glucoside, Polyglyceryl-2 |
| | | | Dipolyhydroxystearate, Glycerin |
| | 2.00 | Lanette O | Cetearyl Alcohol |
| | 12.00 | Myritol 331 | Cocoglycerides |
| | 8.00 | Finsolv TN | C12-15 Alkyl Benzoate |
| | 8.00 | Cetiol B | Dibutyl Adipate |
| B | 6.00 | Uvinul N 539 T | Octocrylene |
| | 5.00 | Z-COTE MAX | Zinc Oxide (and) Diphenyl Capryl |
| | | | Methicone |
| C | 3.00 | Glycerin 87% | Glycerin |
| | 0.10 | Edeta BD | Disodium EDTA |
| | 1.50 | Veegum Ultra | Magnesium Aluminum Silicate |
| | 1.50 | Lanette E | Sodium Cetearyl Sulfate |
| | 0.30 | Carbopol Ultrez 10 P | Carbomer |
| | 2% | Fusion protein-KBD | |
| | 46.10 | Water demin. | Aqua dem. |
| D | 1.00 | Phenonip | Phenoxyethanol, Methylparaben, |
| | | | Ethylparaben, Butylparaben, |
| | | | Propylparaben, Isobutylparaben |

| | | | |
|---|---|---|---|
| A | 4.00 | Eumulgin VL 75 | Lauryl Glucoside, Polyglyceryl-2 |
| | | | Dipolyhydroxystearate, Glycerin |
| | 2.00 | Lanette O | Cetearyl Alcohol |
| | 10.00 | Myritol 331 | Cocoglycerides |
| | 8.00 | Finsolv TN | C12-15 Alkyl Benzoate |
| | 8.00 | Cetiol B | Dibutyl Adipate |
| B | 2.00 | Uvinul A Plus | Diethylamino Hydroxybenzoyl |
| | | | Hexyl Benzoate |
| | 5.00 | Z-COTE MAX | Zinc Oxide (and) Diphenyl Capryl |
| | | | Methicone |
| C | 3.00 | Glycerin 87% | Glycerin |
| | 0.10 | Edeta BD | Disodium EDTA |
| | 1.50 | Veegum Ultra | Magnesium Aluminum Silicate |
| | 1.50 | Lanette E | Sodium Cetearyl Sulfate |
| | 5.0% | Fusion protein-KBD | |
| | 0.30 | Carbopol Ultrez 10 P | Carbomer |
| | | add Water demin. | Water |
| D | 1.00 | Phenonip | Phenoxyethanol, Methylparaben, |
| | | | Ethylparaben, Butylparaben, |
| | | | Propylparaben, Isobutylparaben |

| | | | |
|---|---|---|---|
| A | 3.50 | Cremophor A 6 | Ceteareth-6, Stearyl Alcohol |
| | 1.50 | Cremophor A 25 | Ceteareth-25 |
| | 7.50 | Uvinul MC 80 | Ethylhexyl Methoxycinnamate |
| | 2.00 | Uvinul A Plus | Diethylamino Hydroxybenzoyl Hexyl |
| | | | Benzoate |
| | 2.00 | Dow Corning 345 | Cyclopentasiloxane, |
| | | | Cyclohexasiloxane Fluid |
| | 0.50 | Beeswax 3044 PH | Beeswax |
| | 3.00 | Lanette O | Cetearyl Alcohol |
| | 10.00 | Miglyol 812 | Caprylic/Capric Triglyceride |
| B | 5.00 | T-Lite SF-S Titanium | Titanium Dioxide, Silica Hydrate, |
| | | | Alumina Hydrate, Methicone/ |
| | | | Dimethicone Copolymer |
| C | 3.00 | Glycerin 87% | Glycerin |
| | 0.20 | Edeta BD | Disodium EDTA |
| | 0.30 | Keltrol T | Xanthan Gum |
| | 1.00 | Plantacare 2000 | Decyl Glucoside |
| | 1% | Fusion protein-KBD | |
| | 57.30 | Water demin. | Aqua dem. |
| D | 1.00 | Vitamin E acetate | Tocopheryl Acetate |
| | 0.20 | Bisabolol rac. | Bisabolol |

| | | | |
|---|---|---|---|
| A | 10.00 | Uvinul A Plus B | Ethylhexyl Methoxycinnamate, |
| | | | Diethylamino Hydroxybenzoyl |
| | | | Hexyl Benzoate |
| | 10.00 | Uvinul N 539 T | Octocrylene |
| | 4.00 | Eumulgin VL 75 | Lauryl Glucoside, Polyglyceryl-2 |
| | | | Dipolyhydroxystearate, Glycerin |
| | 8.00 | Cetiol B | Dibutyl Adipate |
| | 8.00 | Finsolv TN | C12-15 Alkyl Benzoate |
| | 12.00 | Myritol 331 | Cocoglycerides |
| | 1.00 | Lanette E | Sodium Cetearyl Sulfate |
| | 2.00 | Lanette O | Cetearyl Alcohol |
| B | 3.00 | Z-COTE MAX | Zinc Oxide (and) Diphenyl |
| | | | Capryl Methicone |
| C | 35.08 | Water demin. | Aqua dem. |
| | 0.38 | Citric acid | Citric Acid |
| | 2.9 | Glycerin 87% | Glycerin |
| | 0.05 | Edeta BD | Disodium EDTA |
| | 0.20 | Allantoin | Allantoin |
| | 0.30 | Keltrol | Xanthan Gum |
| | 0.1% | Fusion protein-KBD | |
| | 1.50 | Veegum Ultra | Magnesium Aluminum Silicate |
| D | 0.50 | Phenonip | |
| | 1.00 | Vitamin E acetate | Tocopheryl Acetate |

| | | | |
|---|---|---|---|
| A | 0.70 | Cremophor A 25 | Ceteareth-25 |
| | 1.70 | Cremophor A 6 | Ceteareth-6, Stearyl Alcohol |
| | 2.00 | Uvinul A Plus | Diethylamino Hydroxybenzoyl Hexyl |
| | | | Benzoate |
| | 3.00 | Uvinul N 539 T | Octocrylene |
| | 3.00 | Z-COTE MAX | Zinc Oxide (and) Diphenyl Capryl |
| | | | methicone |
| | 2.00 | Abil B 8843 | PEG-14 Dimethicone |
| | 3.60 | Lanette O | Cetearyl Alcohol |
| | 4.00 | Uvinul MC 80 | Ethylhexyl Methoxycinnamate |
| | 2.00 | Cetiol B | Dibutyl Adipate |
| B | 4.00 | Glycerin 87% | Glycerin |
| | 0.20 | Edeta BD | Disodium EDTA |
| | 71.00 | Water demin. | Panthenol |
| C | 4.00 | Luvigel EM | Caprylic/Capric Triglyceride, Sodium |
| | | | Acrylates Copolymer |
| D | 1.00 | Vitamin E acetate | Tocopheryl Acetate |
| | 1% | Fusion protein-KBD | |
| | 0.20 | Bisabolol rac. | Bisabolol |
| | q.s. | Preservative | |

| | | | |
|---|---|---|---|
| A | 7.50 | Uvinul MC 80 | Ethylhexyl Methoxycinnamate |
| | 5.00 | Uvinul N 539 T | Octocrylene |
| | 3.00 | Emulgade PL 68/50 | Cetearyl Glucoside, Cetearyl Alcohol |
| | 2.00 | Dracorin 100 SE | Glyceryl Stearate, PEG-100 Stearate |
| | 1.00 | Fitoderm | Squalane |
| | 0.50 | Cremophor WO 7 | PEG-7 Hydrogenated Castor Oil |
| | 0.50 | Cremophor PS 20 | Polysorbate 20 |
| | 2.00 | Dry Flo Pure | Aluminum Starch Octenylsuccinate |
| B | 5.00 | Z-COTE MAX | Zinc Oxide (and) Diphenyl Capryl |
| | | | Methicone |
| | 0.03 | Sicomet Blue | C.I. 77 007, Ultramarines |
| | | P 77 007 | |
| C | 4.00 | 1,2-Propylene | Propylene Glycol |
| | | Glycol Care | |
| | 2.00 | D-Panthenol 50 P | Panthenol, Propylene Glycol |
| | 0.20 | Keltrol | Xanthan Gum |
| | 0.50 | Simulgel 600 | Acrylamide/Sodium |
| | | | Acryloyldimethyltaurate Copolymer, |
| | | | Isohexadecane, Polysorbate 80 |
| | 0.5% | Fusion protein-KBD | |
| | 65.27 | Water demin. | Aqua dem. |
| | q.s. | Preservative | |
| | 0.50 | Vitamin E acetate | Tocopheryl Acetate |

| | | | |
|---|---|---|---|
| A | 6.00 | Gilugel SIL 5 | Cyclomethicone (and) Aluminum/ |
| | | | Magnesium Hydroxide Stearate |
| | 5.00 | Uvinul N 539 T | Octocrylene |
| | 2.00 | Mexoryl XL | Drometrizole Trisiloxane |
| | 1.00 | Uvinul T 150 | Ethylhexyl Triazone |
| | 3.00 | T-Lite SF-S | Titanium Dioxide, Silica Hydrate, |
| | | | Alumina Hydrate, Methicone/ |
| | | | Dimethicone Copolymer |
| | 5.00 | Finsolv TN | C12-15 Alkyl Benzoate |
| | 4.00 | Abil WE 09 | Polyglyceryl-4 Isostearate, |
| | | | Cetyl PEG/PPG-10/1 |
| | | | Dimethicone, Hexyl Laurate |
| | 2.00 | Cosmacol EMI | Di-C12-13 Alkyl Malate |
| | 3.00 | Isopro palmitate | Isopropyl Palmitate |
| | 5.00 | Abil B 8839 | Cyclopentasiloxane, Cyclohexasiloxane |
| | 0.50 | Abil 350 | Dimethicone |
| B | 0.50 | Sodium chloride | Sodium Chloride |
| | 0.20 | Edeta BD | Disodium EDTA |
| | 1% | Fusion protein-KBD | |
| | 61.30 | Water demin. | Aqua dem. |
| C | 1.00 | Vitamin E acetate | Tocopheryl Acetate |
| | 0.50 | Phenonip | |

| | | | |
|---|---|---|---|
| A | 1.00 | Abil Care 85 | Bis-PEG/PPG-16/16 PEG/PPG-16/16 |
| | | | Dimethicone, Caprylic/Capric |
| | | | Triglyceride |
| | 3.00 | Cremophor CO 40 | PEG-40 Hydrogenated Castor Oil |
| | 0.30 | Cremophor WO 7 | PEG-7 Hydrogenated Castor Oil |
| | 5.00 | Uvinul N 539 T | Octocrylene |
| | 10.00 | Witconol APM | PPG-3 Myristyl Ether |
| | 2.00 | Uvinul T 150 | Ethylhexyl Triazone |
| | 1.00 | Dow Corning 345 | Cyclopentasiloxane, Cyclohexasiloxane |
| | | Fluid | |
| | 2.00 | Uvinul A Plus | Diethylamino Hydroxybenzoyl |
| | | | Hexyl Benzoate |
| B | 5.00 | Z-COTE MAX | Zinc Oxide (and) Diphenyl |
| | | | Capryl Silane |
| C | 5.00 | 1,2-Propylene | Propylene Glycol |
| | | glycol | |
| | 0.20 | Keltrol | Xanthan Gum |
| | 0.10 | Edeta BD | Disodium EDTA |
| | 1% | Fusion protein-KBD | |
| | 1.50 | Simulgel 600 | Acrylamide/Sodium |
| | | | Acryloyldimethyltaurate Copolymer, |
| | | | Isohexadecane, Polysorbate 80 |
| | 59.40 | Water demin. | Aqua dem. |
| D | q.s. | Perfume oil | |
| | 0.50 | Glydant | DMDM Hydantoin |

| | | | |
|---|---|---|---|
| A | 7.00 | Uvinul A Plus B | Ethylhexyl Methoxycinnamate, |
| | | | Diethylamino |
| | | | Hydroxybenzoyl Hexyl Benzoate |
| | 1.00 | Tinosorb S | Bis-Ethylhexyloxyphenol |
| | | | Methoxyphenyl |
| | | | Triazine |
| | 1.00 | Uvinul T 150 | Ethylhexyl Triazone |
| | 7.00 | Uvinul N 539 T | Octocrylene |
| | 4.00 | Eumulgin VL 75 | Lauryl Glucoside, Polyglyceryl-2 |
| | | | Dipolyhydroxystearate, Glycerin |
| | 8.00 | Cetiol B | Dibutyl Adipate |
| | 8.00 | Finsolv TN | C12-15 Alkyl Benzoate |
| | 12.00 | Myritol 331 | Cocoglycerides |
| | 1.00 | Lanette E | Sodium Cetearyl Sulfate |
| | 2.00 | Lanette O | Cetearyl Alcohol |
| B | 5.00 | Z-COTE MAX | Zinc Oxide (and) Diphenyl |
| | | | Capryl Methicone |
| C | 35.35 | Water demin. | Aqua dem. |
| | 3.00 | Glycerin 87% | Glycerin |
| | 0.05 | Edeta BD | Disodium EDTA |
| | 0.20 | Allantoin | Allantoin |
| | 0.30 | Keltrol | Xanthan Gum |
| | 0.1% | Fusion protein-KBD | |
| | 1.50 | Veegum Ultra | Magnesium Aluminum Silicate |
| D | 0.50 | Phenonip | |
| | 1.00 | Vitamin E acetate | Tocopheryl Acetate |

| | | | |
|---|---|---|---|
| A | 7.00 | Uvinul A Plus B | Ethylhexyl Methoxycinnamate, |
| | | | Diethylamino |
| | | | Hydroxybenzoyl Hexyl Benzoate |
| | 1.00 | Tinosorb S | Bis-Ethylhexyloxyphenol |
| | | | Methoxyphenyl |
| | | | Triazine |
| | 1.00 | Uvinul T 150 | Ethylhexyl Triazone |
| | 7.00 | Uvinul N 539 T | Octocrylene |
| | 4.00 | Eumulgin VL 75 | Lauryl Glucoside, Polyglyceryl-2 |
| | | | Dipolyhydroxystearate, Glycerin |
| | 8.00 | Cetiol B | Dibutyl Adipate |
| | 8.00 | Finsolv TN | C12-15 Alkyl Benzoate |
| | 12.00 | Myritol 331 | Cocoglycerides |
| | 1.00 | Lanette E | Sodium Cetearyl Sulfate |
| | 2.00 | Lanette O | Cetearyl Alcohol |
| B | 5.00 | T-Lite SF | Titanium Dioxide, Alumina Hydrate, |
| | | | Dimethicone/Methicone Copolymer |
| C | 30.45 | Water demin. | Aqua dem. |
| | 3.00 | Glycerin 87% | Glycerin |
| | 0.05 | Edeta BD | Disodium EDTA |
| | 0.20 | Allantoin | Allantoin |
| | 0.30 | Keltrol | Xanthan Gum |
| | 5% | Fusion protein-KBD | |
| | 1.50 | Veegum Ultra | Magnesium Aluminum Silicate |
| D | 0.50 | Phenonip | |
| | 1.00 | Vitamin E acetate | Tocopheryl Acetate |

| | | |
|---|---|---|
| 5.00 | Z-COTE MAX | Zinc Oxide (and) Diphenyl Capryl |
| | | Methicone |
| 2.00 | Uvinul A Plus | Diethylamino Hydroxybenzoyl Hexyl |
| | | Benzoate |
| 2.00 | Mexoryl XL | Drometrizole Trisiloxane |
| 3.00 | Uvinul MC 80 | Ethylhexyl Methoxycinnamate |
| 0.50 | Abil 350 | Dimethicone |
| 2.75 | Carnico wax LT 20 | Carnauba (Copernica Cerifera) Wax, |
| | | Paraffin |
| 3.70 | Candelilla wax LT 281 LJ | Candelilla (Euphorbia Cerifera) Wax |
| 1.80 | Beeswax 3050 PH | Beeswax |
| 3.20 | TeCero wax 30445 | Microcrystalline Wax |
| 3.20 | TeCero wax 1030 K | Microcrystalline Wax |
| 1.34 | Cutina CP | Cetyl Palmitate |
| 6.40 | Vaseline | Petrolatum |
| 7.30 | Softisan 100 | Hydrogenated Coco-Glycerides |
| 10.00 | Luvitol EHO | Cetearyl Ethylhexanoate |
| 0.17 | Bisabolol nat. | Bisabolol |
| 1.84 | Vitamin E acetate | Tocopheryl Acetate |
| 1% | Fusion protein-KBD | |
| 0.42 | D,L-Alpha-Tocopherol | Tocopherol |
| 40.38 | castor oil | Castor (Ricinus Communis) Oil |

| | | | |
|---|---|---|---|
| A | 1.00 | Abil Care 85 | Bis-PEG/PPG-16/16 PEG/PPG-16/16 Dimethicone, |
| | | | Caprylic/Capric Triglyceride |
| | 3.00 | Cremophor CO 40 | PEG-40 Hydrogenated Castor Oil |
| | 0.30 | Cremophor WO 7 | PEG-7 Hydrogenated Castor Oil |
| | 2.00 | Mexoryl XL | Drometrizole Trisiloxane |
| | 10.00 | Witconol APM | PPG-3 Myristyl Ether |
| | 1.00 | Uvinul T 150 | Ethylhexyl Triazone |
| | 1.00 | Dow Corning 345 Fluid | Cyclopentasiloxane, Cyclohexasiloxane |
| | 5.00 | Uvinul N 539 T | Octocrylene |
| B | 3.00 | T-Lite SF-S | Titanium Dioxide, Silica Hydrate, Alumina Hydrate, |
| | | | Methicone/Dimethicone Copolymer |
| C | 5.00 | 1,2-Propylene glycol | Propylene Glycol |
| | 1.00 | Mexoryl SX | Terephthalidene Dicamphor Sulfanic Acid |
| | 0.20 | Keltrol | Xanthan Gum |
| | 0.10 | Edeta BD | Disodium EDTA |
| | 1% | Fusion protein-KBD | |
| | 1.50 | Simulgel 600 | Acrylamide/Sodium Acryloyldimethyltaurate |
| | | | Copolymer, Isohexadecane, Polysorbate 80 |
| | 69.50 | Water demin. | Aqua dem. |
| D | q.s. | Perfume oil | |
| | 0.50 | Glydant | DMDM Hydantoin |

| | | | |
|---|---|---|---|
| A | 1.00 | Abil Care 85 | Bis-PEG/PPG-16/16 PEG/PPG-16/16 Dimethicone, |
| | | | Caprylic/Capric Triglyceride |
| | 3.00 | Cremophor CO 40 | PEG-40 Hydrogenated Castor Oil |
| | 0.30 | Cremophor WO 7 | PEG-7 Hydrogenated Castor Oil |
| | 2.00 | Parsol 1789 | Butyl Methoxydibenzoylmethane |
| | 2.00 | Mexoryl XL | Drometrizole Trisiloxane |
| | 10.00 | Witconol APM | PPG-3 Myristyl Ether |
| | 1.00 | Uvinul T 150 | Ethylhexyl Triazone |
| | 1.00 | Dow Corning 345 Fluid | Cyclopentasiloxane, Cyclohexasiloxane |
| | 5.00 | Uvinul N 539 T | Octocrylene |
| B | 3.00 | T-Lite SF-S | Titanium Dioxide, Silica Hydrate, Alumina Hydrate, |
| | | | Methicone/Dimethicone Copolymer |
| C | 5.00 | 1,2-Propylene glycol | Propylene Glycol |
| | 1.00 | Mexoryl SX | Terephthalidene Dicamphor Sulfanic Acid |
| | 0.20 | Keltrol | Xanthan Gum |
| | 0.10 | Edeta BD | Disodium EDTA |
| | 0.2% | Fusion protein-KBD | |
| | 1.50 | Simulgel 600 | Acrylamide/Sodium Acryloyldimethyltaurate |
| | | | Copolymer, Isohexadecane, Polysorbate 80 |
| | 68.30 | Water demin. | Aqua dem. |
| D | q.s. | Perfume oil | |
| | 0.50 | Glydant | DMDM Hydantoin |

| | | | |
|---|---|---|---|
| A | 0.70 | Cremophor A 25 | Ceteareth-25 |
| | 1.70 | Cremophor A 6 | Ceteareth-6, Stearyl Alcohol |
| | 2.00 | Parsol 1789 | Butyl Methoxydibenzoylmethane |
| | 5.00 | Uvinul N 539 T | Octocrylene |
| | 4.00 | Z-COTE MAX | Zinc Oxide (and) Diphenyl Capryl |
| | | | methicone |
| | 2.00 | Abil B 8843 | PEG-14 Dimethicone |
| | 3.60 | Lanette O | Cetearyl Alcohol |
| | 1.00 | Uvinul T150 | Ethylhexyl Triazone |
| | 2.00 | Cetiol B | Dibutyl Adipate |
| B | 4.00 | Glycerin 87% | Glycerin |
| | 0.20 | Edeta BD | Disodium EDTA |
| | 71.00 | Water demin. | Panthenol |
| C | 4.00 | Luvigel EM | Caprylic/Capric Triglyceride, Sodium |
| | | | Acrylates Copolymer |
| | 1% | Fusion protein-KBD | |
| D | 1.00 | Vitamin E acetate | Tocopheryl Acetate |
| | 0.20 | Bisabolol rac. | Bisabolol |
| | q.s. | Preservative | |

| | | | |
|---|---|---|---|
| A | 1.00 | Abil Care 85 | Bis-PEG/PPG-16/16 PEG/PPG-16/16 Dimethicone, |
| | | | Caprylic/Capric Triglyceride |
| | 3.00 | Cremophor CO 40 | PEG-40 Hydrogenated Castor Oil |
| | 0.30 | Cremophor WO 7 | PEG-7 Hydrogenated Castor Oil |
| | 2.00 | Parsol 1789 | Butyl Methoxydibenzoylmethane |
| | 2.00 | Mexoryl XL | Drometrizole Trisiloxane |
| | 10.00 | Witconol APM | PPG-3 Myristyl Ether |
| | 1.00 | Uvinul T 150 | Ethylhexyl Triazone |
| | 1.00 | Dow Corning 345 Fluid | Cyclopentasiloxane, Cyclohexasiloxane |
| | 5.00 | Uvinul N 539 T | Octocrylene |
| B | 3.00 | Z-COTE MAX | Zinc Oxide (and) Diphenyl Capryl Methicone |
| C | 5.00 | 1,2-Propylene glycol | Propylene Glycol |
| | 1.00 | Mexoryl SX | Terephthalidene Dicamphor Sulfanic Acid |
| | 0.20 | Keltrol | Xanthan Gum |
| | 0.10 | Edeta BD | Disodium EDTA |
| | 1.50 | Simulgel 600 | Acrylamide/Sodium Acryloyldimethyltaurate |
| | | | Copolymer, Isohexadecane, Polysorbate 80 |
| | 0.5% | Fusion protein-KBD | |
| | 68.00 | Water demin. | Aqua dem. |
| D | q.s. | Perfume oil | |
| | 0.50 | Glydant | DMDM Hydantoin |

| | | | |
|---|---|---|---|
| A | 2.00 | Uvinul A Plus | Diethylamino Hydroxybenzoyl Hexyl Benzoate |
| | 3.00 | Uvinul N 539 T | Octocrylene |
| | 3.00 | Emulgade PL 68/50 | Cetearyl Glucoside, Cetearyl Alcohol |
| | 2.00 | Dracorin 100 SE | Glyceryl Stearate, PEG-100 Stearate |
| | 1.00 | Fitoderm | Squalane |
| | 0.5 | Cremophor WO 7 | PEG-7 Hydrogenated Castor Oil |
| | 0.5 | Cremophor PS 20 | Polysorbate 20 |
| | 2.00 | Dry Flo Pure | Aluminum Starch Octenylsuccinate |
| B | 5.00 | Z-COTE MAX | Zinc Oxide (and) Diphenyl Capryl methicone |
| C | 4.00 | 1,2-Propylene glycol Care | Propylene Glycol |
| | 0.20 | Keltrol | Xanthan Gum |
| | 0.50 | Simulgel 600 | Acrylamide/Sodium Acryloyldimethyltaurate |
| | | | Copolymer, Isohexadecane, Polysorbate 80 |
| | 65.80 | Water demin. | Aqua dem |
| D | 0.50 | Euxyl K 300 | |
| | 0.50 | Vitamin E acetate | Tocopheryl Acetate |
| | 1% | Fusion protein-KBD | |
| | | | Carprylic/Capric Triglyceride, Sodium |
| | | | Ascorbate, Tocopherol, Retinol |

| | | | |
|---|---|---|---|
| A | 2.00 | Uvinul A Plus | Diethylamino Hydroxybenzoyl Hexyl Benzoate |
| | 3.00 | Uvinul N 539 T | Octocrylene |
| | 3.00 | Emulgade PL 68/50 | Cetearyl Glucoside, Cetearyl Alcohol |
| | 2.00 | Dracorin 100 SE | Glyceryl Stearate, PEG-100 Stearate |
| | 1.00 | Fitoderm | Squalane |
| | 0.5 | Cremophor WO 7 | PEG-7 Hydrogenated Castor Oil |
| | 0.5 | Cremophor PS 20 | Polysorbate 20 |
| | 2.00 | Dry Flo Pure | Aluminum Starch Octenylsuccinate |
| B | 5.00 | Z-COTE MAX | Zinc Oxide (and) Diphenyl Capryl methicone |
| C | 4.00 | 1,2-Propylene glycol Care | Propylene Glycol |
| | 0.20 | Keltrol | Xanthan Gum |
| | 0.50 | Simulgel 600 | Acrylamide/Sodium Acryloyldimethyltaurate |
| | | | Copolymer, Isohexadecane, Polysorbate 80 |
| | 65.80 | Water demin. | Aqua dem |
| D | 0.50 | Euxyl K 300 | |
| | 0.50 | Vitamin E acetate | Tocopheryl Acetate |
| | 1% | Fusion protein-KBD | |
| | 1.00 | RetiSTAR | Caprylic/Capric Triglyceride, Sodium |
| | | | Ascorbate, Tocopherol, Retinol |

1. A chimeric keratin-binding effector protein comprising
(a) at least one keratin-binding polypeptide (i) and
(b) at least one further effector polypeptide (ii).

2. The keratin-binding effector protein according to claim 1, where the keratin-binding polypeptide (i) has binding affinity to human hair keratin, nail keratin or skin keratin.

3. The keratin-binding effector protein according to claim 1, where the keratin-binding polypeptide (i) used
a) comprises at least one of the sequences according to SEQ ID NO: 2, 4, 6, 8, 10, 12, 14, 16, 18, 20, 22, 24, 26, 28, 30, 32, 34, 36, 38, 40, 42, 44, 46, 48, 50, 52, 54, 56, 58, 60, 62, 64, 66, 68, 70, 72, 74, 76, 78, 80, 82, 84, 86, 88, 90, 92, 94, 96, 98, 100, 102, 104, 106, 108, 110, 112, 114, 116, 118, 120, 122, 124, 126, 128, 130, 132, 134, 136, 138, 140, 146, 150, 153, 156, 157, 158, 160, 162, 164, 166, 213 or 215, or
b) corresponds to a polypeptide which is at least 40% identical to at least one of the sequences according to SEQ ID NO: 2, 4, 6, 8, 10, 12, 14, 16, 18, 20, 22, 24, 26, 28, 30, 32, 34, 36, 38, 40, 42, 44, 46, 48, 50, 52, 54, 56, 58, 60, 62, 64, 66, 68, 70, 72, 74, 76, 78, 80, 82, 84, 86, 88, 90, 92, 94, 96, 98, 100, 102, 104, 106, 108, 110, 112, 114, 116, 118, 120, 122, 124, 126, 128, 130, 132, 134, 136, 138, 140, 146, 150, 153, 156, 157, 158, 160, 162, 164, 166, 213 or 215 and is able to bind keratin.

4. The keratin-binding effector protein according to claim 1, where the keratin-binding polypeptide (i) used is encoded by a nucleic acid molecule comprising at least one nucleic acid molecule chosen from the group consisting of:
a) a nucleic acid molecule which encodes a polypeptide comprising the sequence shown in SEQ ID NO: 2, 4, 6, 8, 10, 12, 14, 16, 18, 20, 22, 24, 26, 28, 30, 32, 34, 36, 38, 40, 42, 44, 46, 48, 50, 52, 54, 56, 58, 60, 62, 64, 66, 68, 70, 72, 74, 76, 78, 80, 82, 84, 86, 88, 90, 92, 94, 96, 98, 100, 102, 104, 106, 108, 110, 112, 114, 116, 118, 120, 122, 124, 126, 128, 130, 132, 134, 136, 138, 140, 146, 150, 153, 156, 157, 158, 160, 162, 164, 166, 213 or 215;
b) a nucleic acid molecule which comprises at least one polynucleotide of the sequence shown in SEQ ID NO: 1, 3, 5, 7, 9, 11, 13, 15, 17, 19, 21, 23, 25, 27, 29, 31, 33, 35, 37, 39, 41, 43, 45, 47, 49, 51, 53, 55, 57, 59, 61, 63, 65, 67, 69, 71, 73, 75, 77, 79, 81, 83, 85, 87, 89, 91, 93, 95, 97, 99, 101, 103, 105, 107, 109, 111, 113, 115, 117, 119, 121, 123, 125, 127, 129, 131, 133, 135, 137, 139, 145, 149, 152, 159, 161, 163, 165, 212 or 214;
c) a nucleic acid molecule which encodes a polypeptide according to the sequences SEQ ID NO: 2, 4, 6, 8, 10, 12, 14, 16, 18, 20, 22, 24, 26, 28, 30, 32, 34, 36, 38, 40, 42, 44, 46, 48, 50, 52, 54, 56, 58, 60, 62, 64, 66, 68, 70, 72, 74, 76, 78, 80, 82, 84, 86, 88, 90, 92, 94, 96, 98, 100, 102, 104, 106, 108, 110, 112, 114, 116, 118, 120, 122, 124, 126, 128, 130, 132, 134, 136, 138, 140, 146, 150, 153, 156, 157, 158, 160, 162, 164, 166, 213 or 215;
d) a nucleic acid molecule with a nucleic acid sequence corresponding to at least one of the sequences according to SEQ ID NO: 1, 3, 5, 7, 9, 11, 13, 15, 17, 19, 21, 23, 25, 27, 29, 31, 33, 35, 37, 39, 41, 43, 45, 47, 49, 51, 53, 55, 57, 59, 61, 63, 65, 67, 69, 71, 73, 75, 77, 79, 81, 83, 85, 87, 89, 91, 93, 95, 97, 99, 101, 103, 105, 107, 109, 111, 113, 115, 117, 119, 121, 123, 125, 127, 129, 131, 133, 135, 137, 139, 145, 149, 152, 159, 161, 163, 165, 212 or 214 or a nucleic acid molecule derived therefrom by substitution, deletion or insertion which encodes a polypeptide which is at least 40% identical to at least one of the sequences according to SEQ ID NO: 2, 4, 6, 8, 10, 12, 14, 16, 18, 20, 22, 24, 26, 28, 30, 32, 34, 36, 38, 40, 42, 44, 46, 48, 50, 52, 54, 56, 58, 60, 62, 64, 66, 68, 70, 72, 74, 76, 78, 80, 82, 84, 86, 88, 90, 92, 94, 96, 98, 100, 102, 104, 106, 108, 110, 112, 114, 116, 118, 120, 122, 124, 126, 128, 130, 132, 134, 136, 138, 140, 146, 150, 153, 156, 157, 158, 160, 162, 164, 166, 213 or 215 and is able to bind to keratin;
e) a nucleic acid molecule which encodes a polypeptide which is recognized by a monoclonal antibody directed toward a polypeptide which is encoded by the nucleic acid molecules according to (a) to (c);
f) a nucleic acid molecule coding for a keratin-binding protein which, under stringent conditions, hybridizes with a nucleic acid molecule according to (a) to (c);
g) a nucleic acid molecule coding for a keratin-binding protein which can be isolated from a DNA bank using a nucleic acid molecule according to (a) to (c) or part fragments thereof comprising at least 15 nucleotides as probe under stringent hybridization conditions; and
h) a nucleic acid molecule which can be produced by backtranslating one of the amino acid sequences shown in the sequences SEQ ID NO: 2, 4, 6, 8, 10, 12, 14, 16, 18, 20, 22, 24, 26, 28, 30, 32, 34, 36, 38, 40, 42, 44, 46, 48, 50, 52, 54, 56, 58, 60, 62, 64, 66, 68, 70, 72, 74, 76, 78, 80, 82, 84, 86, 88, 90, 92, 94, 96, 98, 100, 102, 104, 106, 108, 110, 112, 114, 116, 118, 120, 122, 124, 126, 128, 130, 132, 134, 136, 138, 140, 146, 150, 153, 156, 157, 158, 160, 162, 164, 166, 213 or 215.

5. The keratin-binding effector protein according to claim 1, where the effector polypeptide (ii) is chosen from the group consisting of enzymes, antibodies, effector-binding proteins, fluorescent proteins, antimicrobial peptides, and self-assembling proteins.

6. The keratin-binding effector protein according to claim 5, where the effector polypeptide (ii) is an enzyme chosen from the group consisting of oxidases, peroxidases, proteases, tyrosinases, lactoperoxidase, lysozyme, amyloglycosidases, glucose oxidases, superoxide dismutases, photolyases and catalases.

7. The keratin-binding effector protein according to claim 6, where the effector polypeptide (ii) is a silk protein.

8. The keratin-binding effector protein according to claim 7, where the silk protein comprises at least one of the sequences according to SEQ ID NO: 151, 201, 202, 203, 204, 205, 206, 207, 208, 209 or 210, or corresponds to a polypeptide which is at least 40% identical to at least one of the sequences according to SEQ ID No.: 151, 201, 202, 203, 204, 205, 206, 207, 208, 209 or 210.

9. The keratin-binding effector protein according to claim 7, where the silk protein is encoded by a nucleic acid molecule comprising at least one nucleic acid molecule chosen from the group consisting of:
a) a nucleic acid molecule which encodes a polypeptide comprising the sequence shown in SEQ ID No.: 151, 201, 202, 203, 204, 205, 206, 207, 208, 209 or 210;
b) a nucleic acid molecule which comprises at least one polynucleotide of the sequence shown in SEQ ID No. 150;
c) a nucleic acid molecule which encodes a polypeptide according to the sequences SEQ ID No.: 151, 201, 202, 203, 204, 205, 206, 207, 208, 209 or 210;
d) a nucleic acid molecule with a nucleic acid sequence according to SEQ ID No.: 150 or a nucleic acid molecule derived therefrom by substitution, deletion or insertion which encodes a polypeptide which is at least 40% identical to the sequence according to SEQ ID No.: 151;
e) a nucleic acid molecule which encodes a polypeptide which is recognized by a monoclonal antibody directed toward a polypeptide which is encoded by the nucleic acid molecules according to (k) to (m);
f) a nucleic acid molecule coding for a keratin-binding protein which hybridizes under stringent conditions with a nucleic acid molecule according to (k) to (m);
g) a nucleic acid molecule coding for a keratin-binding protein which can be isolated from a DNA bank using a nucleic acid molecule according to (k) to (m) or part fragments thereof comprising at least 15 nucleotides as probe under stringent hybridization conditions; and
h) a nucleic acid molecule which can be produced by backtranslating one of the amino acid sequences shown in the sequences SEQ ID No.: 151, 201, 202, 203, 204, 205, 206, 207, 208, 209 or 210.

10. The keratin-binding effector protein according to claim 1, where the polypeptides (i) and (ii) are linked together by means of translation fusion.

11. The keratin-binding effector protein according to claim 1, where the polypeptides (i) and (ii) are linked together by means of a chemical coupling reaction.

12. The keratin-binding effector protein according to claim 11, where the effector polypeptide (ii) is covalently bonded to side chains of internal amino acids, the C-terminus or the N-terminus of the keratin-binding polypeptide (i).

13. The keratin-binding effector protein according to claim 1, where the effector polypeptide (ii) and the keratin binding polypeptide (i) are joined together by means of a spacer element.

14. The keratin-binding effector protein according to claim 13, where the spacer element is a crosslinker.

15. The keratin-binding effector protein according to claim 13, where the spacer element is an at least bifunctional linker which covalently joins together the keratin-binding polypeptide (i) and the effector polypeptide by binding to side chains of internal amino acids, the C-terminus or the N-terminus of said polypeptides.

16. The keratin-binding effector protein according to claim 13, where the spacer element is a polypeptide.

17. The use of the keratin-binding effector proteins described in claims 1-16 in dermocosmetics.

18. The use according to claim 17, where the dermocosmetic is a skin protection composition, skincare composition, skin cleansing composition, hair protection composition, haircare composition, hair cleansing composition, hair colorant or a decorative cosmetic.

19. A dermocosmetic comprising the keratin-binding effector protein of claim 1.

20. A protein comprising one of the amino acid sequences shown in SEQ ID NO: 168, 176, 182, 188, 194, or 200.

21. A nucleic acid molecule comprising the sequence shown in SEQ ID NO: 167, 175, 181, 187, 193 or 199.

22. A DNA expression cassette comprising a the nucleic acid molecule of claim 21.

23. A vector comprising the expression cassette claim 22.

24. A transgenic cell comprising the nucleic acid molecule of claim 21, an expression cassette comprising the nucleic acid molecule, or a vector comprising the expression cassette.

25. The dermocosmetic of claim 19, wherein the dermocosmetic is a skin protection composition, skincare composition, skin cleansing composition, hair protection composition, haircare composition, hair cleansing composition, hair colorant, or a decorative cosmetic.

26. A nucleic acid molecule encoding the protein of claim 20.

27. A transgenic cell comprising the nucleic acid molecule of claim 26, an expression cassette comprising the nucleic acid molecule, or a vector comprising the expression cassette.

The application's sequence listing, which the Patent Office published only in electronic form, follows.

SEQUENCE LISTING (228 sequences)

SEQ ID NO: 1 - DNA, 8616 bp, Homo sapiens
  CDS (1)..(8616)
atgagctgcaacggaggctcccacccgcggatcaacactctgggccgcatgatccgcgccgagtctggcccggacctgcgctacgaggtgaccagcggcggcgggggcaccagcaggatgtactattctcggcgcggcgtgatcaccgaccagaactcggacggctactgtcaaaccggcacgatgtccaggcaccagaaccagaacaccatccaggagctgctgcagaactgctccgactgcttgatgcgagcagagctcatcgtgcagcctgaattgaagtatggagatggaatacaactgactcggagtcgagaattggatgagtgttttgcccaggccaatgaccaaatggaaatcctcgacagcttgatcagagagatgcggcagatgggccagccctgtgatgcttaccagaaaaggcttcttcagctccaagagcaaatgcgagccctttataaagccatcagtgtccctcgagtccgcagggccagctccaagggtggtggaggctacacttgtcagagtggctctggctgggatgagttcaccaaacatgtcaccagtgaatgtttggggtggatgaggcagcaaagggcggagatggacatggtggcctggggtgtggacctggcctcagtggagcagcacattaacagccaccggggcatccacaactccatcggcgactatcgctggcagctggacaaaatcaaagccgacctgcgcgagaaatctgcgatctaccagttggaggaggagtatgaaaacctgctgaaagcgtcctttgagaggatggatcacctgcgacagctgcagaacatcattcaggccacgtccagggagatcatgtggatcaatgactgcgaggaggaggagctgctgtacgactggagcgacaagaacaccaacatcgctcagaaacaggaggccttctccatacgcatgagtcaactggaagttaaagaaaaagagctcaataagctgaaacaagaaagtgaccaacttgtcctcaatcagcatccagcttcagacaaaattgaggcctatatggacactctgcagacgcagtggagttggattcttcagatcaccaagtgcattgatgttcatctgaaagaaaatgctgcctactttcagttttttgaagaggcgcagtctactgaagcatacctgaaggggctccaggactccatcaggaagaagtacccctgcgacaagaacatgcccctgcagcacctgctggaacagatcaaggagctggagaaagaacgagagaaaatccttgaatacaagcgtcaggtgcagaacttggtaaacaagtctaagaagattgtacagctgaagcctcgtaacccagactacagaagcaataaacccattattctcagagctctctgtgactacaaacaagatcagaaaatcgtgcataagggggatgagtgtatcctgaaggacaacaacgagcgcagcaagtggtacgtgacgggcccgggaggcgttgacatgcttgttccctctgtggggctgatcatccctcctccgaacccactggccgtggacctctcttgcaagattgagcagtactacgaagccatcttggctctgtggaaccagctctacatcaacatgaagagcctggtgtcctggcactactgcatgattgacatagagaagatcagggccatgacaatcgccaagctgaaaacaatgcggcaggaagattacatgaagacgatagccgaccttgagttacattaccaagagttcatcagaaatagccaaggctcagagatgtttggagatgatgacaagcggaaaatacagtctcagttcaccgatgcccagaagcattaccagaccctggtcattcagctccctggctatccccagcaccagacagtgaccacaactgaaatcactcatcatggaacctgccaagatgtcaaccataataaagtaattgaaaccaacagagaaaatgacaagcaagaaacatggatgctgatggagctgcagaagattcgcaggcagatagagcactgcgagggcaggatgactctcaaaaacctccctctagcagaccaggggtcttctcaccacatcacagtgaaaattaacgagcttaagagtgtgcagaatgattcacaagcaattgctgaggttctcaaccagcttaaagatatgcttgccaacttcagaggttctgaaaagtactgctatttacagaatgaagtatttggactatttcagaaactggaaaatatcaatggtgttacagatggctacttaaatagcttatgcacagtaagggcactgctccaggctattctccaaacagaagacatgttaaaggtttatgaagccaggctcactgaggaggaaactgtctgcctggacctggataaagtggaagcttaccgctgtggactgaagaaaataaaaaatgacttgaacttgaagaagtcgttgttggccactatgaagacagaactacagaaagcccagcagatccactctcagacttcacagcagtatccactttatgatctggacttgggcaagttcggtgaaaaagtcacacagctgacagaccgctggcaaaggatagataaacagatcgactttaggttatgggacctggagaaacaaatcaagcaattgaggaattatcgtgataactatcaggctttctgcaagtggctctatgatgctaaacgccgccaggattccttagaatccatgaaatttggagattccaacacagtcatgcggtttttgaatgagcagaagaacttgcacagtgaaatatctggcaaacgagacaaatcagaggaagtacaaaaaattgctgaactttgcgccaattcaattaaggattatgagctccagctggcctcatacacctcaggactggaaactctgctgaacatacctatcaagaggaccatgattcagtccccttctggggtgattctgcaagaggctgcagatgttcatgctcggtacattgaactacttacaagatctggagactattacaggttcttaagtgagatgctgaagagtttggaagatctgaagctgaaaaataccaagatcgaagttttggaagaggagctcagactggcccgagatgccaactcggaaaactgtaataagaacaaattcctggatcagaacctgcagaaataccaggcagagtgttcccagttcaaagcgaagcttgcgagcctggaggagctgaagagacaggctgagctggatgggaagtcggctaagcaaaatctagacaagtgctacggccaaataaaagaactcaatgagaagatcacccgactgacttatgagattgaagatgaaaagagaagaagaaaatctgtggaagacagatttgaccaacagaagaatgactatgaccaactgcagaaagcaaggcaatgtgaaaaggagaaccttggttggcagaaattagagtctgagaaagccatcaaggagaaggagtacgagattgaaaggttgagggttctactgcaggaagaaggcacccggaagagagaatatgaaaatgagctggcaaaggtaagaaaccactataatgaggagatgagtaatttaaggaacaagtatgaaacagagattaacattacgaagaccaccatcaaggagatatccatgcaaaaagaggatgattccaaaaatcttagaaaccagcttgatagactttcaagggaaaatcgagatctgaaggatgaaattgtcaggctcaatgacagcatcttgcaggccactgagcagcgaaggcgagctgaagaaaacgcccttcagcaaaaggcctgtggctctgagataatgcagaagaagcagcatctggagatagaactgaagcaggtcatgcagcagcgctctgaggacaatgcccggcacaagcagtccctggaggaggctgccaagaccattcaggacaaaaataaggagatcgagagactcaaagctgagtttcaggaggaggccaagcgccgctgggaatatgaaaatgaactgagtaaggtaagaaacaattatgatgaggagatcattagcttaaaaaatcagtttgagaccgagatcaacatcaccaagaccaccatccaccagctcaccatgcagaaggaagaggataccagtggctaccgggctcagatagacaatctcacccgagaaaacaggagcttatctgaagaaataaagaggctgaagaacactctaacccagaccacagagaatctcaggagggtggaagaagacatccaacagcaaaaggccactggctctgaggtgtctcagaggaaacagcagctggaggttgagctgagacaagtcactcagatgcgaacagaggagagcgtaagatataagcaatctcttgatgatgctgccaaaaccatccaggataaaaacaaggagatagaaaggttaaaacaactgatcgacaaagaaacaaatgaccggaaatgcctggaagatgaaaacgcgagattacaaagggtccagtatgacctgcagaaagcaaacagtagtgcgacggagacaataaacaaactgaaggttcaggagcaagaactgacacgcctgaggatcgactatgaaagggtttcccaggagaggactgtgaaggaccaggatatcacgcggttccagaactctctgaaagagctgcagctgcagaagcagaaggtggaagaggagctgaatcggctgaagaggaccgcgtcagaagactcctgcaagaggaagaagctggaggaagagctggaaggcatgaggaggtcgctgaaggagcaagccatcaaaatcaccaacctgacccagcagctggagcaggcatccattgttaagaagaggagtgaggatgacctccggcagcagagggacgtgctggatggccacctgagggaaaagcagaggacccaggaagagctgaggaggctctcttctgaggtcgaggccctgaggcggcagttactccaggaacaggaaagtgtcaaacaagctcacttgaggaatgagcatttccagaaggcgatagaagataaaagcagaagcttaaatgaaagcaaaatagaaattgagaggctgcagtctctcacagagaacctgaccaaggagcacttgatgttagaagaagaactgcggaacctgaggctggagtacgatgacctgaggagaggacgaagcgaagcggacagtgataaaaatgcaaccatcttggaactaaggagccagctgcagatcagcaacaaccggaccctggaactgcaggggctgattaatgatttacagagagagagggaaaatttgagacaggaaattgagaaattccaaaagcaggctttagaggcatctaataggattcaggaatcaaagaatcagtgtactcaggtggtacaggaaagagagagccttctggtgaaaatcaaagtcctggagcaagacaaggcaaggctgcagaggctggaggatgagctgaatcgtgcaaaatcaactctagaggcagaaaccagggtgaaacagcgcctggagtgtgagaaacagcaaattcagaatgacctgaatcagtggaagactcaatattcccgcaaggaggaggctattaggaagatagaatcggaaagagaaaagagtgagagagagaagaacagtcttaggagtgagatcgaaagactccaagcagagatcaagagaattgaagagaggtgcaggcgtaagctggaggattctaccagggagacacagtcacagttagaaacagaacgctcccgatatcagagggagattgataaactcagacagcgcccatatgggtcccatcgagagacccagactgagtgtgagtggaccgttgacacctccaagctggtgtttgatgggctgaggaagaaggtgacagcaatgcagctctatgagtgtcagctgatcgacaaaacaaccttggacaaactattgaaggggaagaagtcagtggaagaagttgcttctgaaatccagccattccttcggggtgcaggatctatcgctggagcatctgcttctcctaaggaaaaatactctttggtagaggccaagagaaagaaattaatcagcccagaatccacagtcatgcttctggaggcccaggcagctacaggtggtataattgatccccatcggaatgagaagctgactgtcgacagtgccatagctcgggacctcattgacttcgatgaccgtcagcagatatatgcagcagaaaaagctatcactggttttgatgatccattttcaggcaagacagtatctgtttcagaagccatcaagaaaaatttgattgatagagaaaccggaatgcgcctgctggaagcccagattgcttcagggggtgtagtagaccctgtgaacagtgtctttttgccaaaagatgtcgccttggcccgggggctgattgatagagatttgtatcgatccctgaatgatccccgagatagtcagaaaaactttgtggatccagtcaccaaaaagaaggtcagttacgtgcagctgaaggaacggtgcagaatcgaaccacatactggtctgctcttgctttcagtacagaagagaagcatgtccttccaaggaatcagacaacctgtgaccgtcactgagctagtagattctggtatattgagaccgtccactgtcaatgaactggaatctggtcagatttcttatgacgaggttggtgagagaattaaggacttcctccagggttcaagctgcatagcaggcatatacaatgagaccacaaaacagaagcttggcatttatgaggccatgaaaattggcttagtccgacctggtactgctctggagttgctggaagcccaagcagctactggctttatagtggatcctgttagcaacttgaggttaccagtggaggaagcctacaagagaggtctggtgggcattgagttcaaagagaagctcctgtctgcagaacgagctgtcactgggtataatgatcctgaaacaggaaacatcatctctttgttccaagccatgaataaggaactcatcgaaaagggccacggtattcgcttattagaagcacagatcgcaaccggggggatcattgacccaaaggagagccatcgtttaccagttgacatagcatataagaggggctatttcaatgaggaactcagtgagattctctcagatccaagtgatgataccaaaggattttttgaccccaacactgaagaaaatcttacctatctgcaactaaaagaaagatgcattaaggatgaggaaacagggctctgtcttctgcctctgaaagaaaagaagaaacaggtgcagacatcacaaaagaataccctcaggaagcgtagagtggtcatagttgacccagaaaccaataaagaaatgtctgttcaggaggcctacaagaagggcctaattgattatgaaaccttcaaagaactgtgtgagcaggaatgtgaatgggaagaaataaccatcacgggatcagatggctccaccagggtggtcctggtagatagaaagacaggcagtcagtatgatattcaagatgctattgacaagggccttgttgacaggaagttctttgatcagtaccgatccggcagcctcagcctcactcaatttgctgacatgatctccttgaaaaatggtgtcggcaccagcagcagcatgggcagtggtgtcagcgatgatgtttttagcagctcccgacatgaatcagtaagtaagatttccaccatatccagcgtcaggaatttaaccataaggagcagctctttttcagacaccctggaagaatcgagccccattgcagccatctttgacacagaaaacctggagaaaatctccattacagaaggtatagagcggggcatcgttgacagcatcacgggtcagaggcttctggaggctcaggcctgcacaggtggcatcatccacccaaccacgggccagaagctgtcacttcaggacgcagtctcccagggtgtgattgaccaagacatggccaccaggctgaagcctgctcagaaagccttcataggcttcgagggtgtgaagggaaagaagaagatgtcagcagcagaggcagtgaaagaaaaatggctcccgtatgaggctggccagcgcttcctggagttccagtacctcacgggaggtcttgttgacccggaagtgcatgggaggataagcaccgaagaagccatccggaaggggttcatagatggccgcgccgcacagaggctgcaagacaccagcagctatgccaaaatcctgacctgccccaaaaccaaattaaaaatatcctataaggatgccataaatcgctccatggtagaagatatcactgggctgcgccttctggaagccgcctccgtgtcgtccaagggcttacccagcccttacaacatgtcttcggctccggggtcccgctccggctcccgctcgggatctcgctccggatctcgctccgggtcccgcagtgggtcccggagaggaagctttgacgccacagggaattcttcctactcttattcctactcatttagcagtagttctattgggcactag

SEQ ID NO: 2 - protein, 2871 aa, Homo sapiens
MSCNGGSHPRINTLGRMIRAESGPDLRYEVTSGGGGTSRMYYSRRGVITDQNSDGYCQTGTMSRHQNQNTIQELLQNCSDCLMRAELIVQPELKYGDGIQLTRSRELDECFAQANDQMEILDSLIREMRQMGQPCDAYQKRLLQLQEQMRALYKAISVPRVRRASSKGGGGYTCQSGSGWDEFTKHVTSECLGWMRQQRAEMDMVAWGVDLASVEQHINSHRGIHNSIGDYRWQLDKIKADLREKSAIYQLEEEYENLLKASFERMDHLRQLQNIIQATSREIMWINDCEEEELLYDWSDKNTNIAQKQEAFSIRMSQLEVKEKELNKLKQESDQLVLNQHPASDKIEAYMDTLQTQWSWILQITKCIDVHLKENAAYFQFFEEAQSTEAYLKGLQDSIRKKYPCDKNMPLQHLLEQIKELEKEREKILEYKRQVQNLVNKSKKIVQLKPRNPDYRSNKPIILRALCDYKQDQKIVHKGDECILKDNNERSKWYVTGPGGVDMLVPSVGLIIPPPNPLAVDLSCKIEQYYEAILALWNQLYINMKSLVSWHYCMIDIEKIRAMTIAKLKTMRQEDYMKTIADLELHYQEFIRNSQGSEMFGDDDKRKIQSQFTDAQKHYQTLVIQLPGYPQHQTVTTTEITHHGTCQDVNHNKVIETNRENDKQETWMLMELQKIRRQIEHCEGRMTLKNLPLADQGSSHHITVKINELKSVQNDSQAIAEVLNQLKDMLANFRGSEKYCYLQNEVFGLFQKLENINGVTDGYLNSLCTVRALLQAILQTEDMLKVYEARLTEEETVCLDLDKVEAYRCGLKKIKNDLNLKKSLLATMKTELQKAQQIHSQTSQQYPLYDLDLGKFGEKVTQLTDRWQRIDKQIDFRLWDLEKQIKQLRNYRDNYQAFCKWLYDAKRRQDSLESMKFGDSNTVMRFLNEQKNLHSEISGKRDKSEEVQKIAELCANSIKDYELQLASYTSGLETLLNIPIKRTMIQSPSGVILQEAADVHARYIELLTRSGDYYRFLSEMLKSLEDLKLKNTKIEVLEEELRLARDANSENCNKNKFLDQNLQKYQAECSQFKAKLASLEELKRQAELDGKSAKQNLDKCYGQIKELNEKITRLTYEIEDEKRRRKSVEDRFDQQKNDYDQLQKARQCEKENLGWQKLESEKAIKEKEYEIERLRVLLQEEGTRKREYENELAKVRNHYNEEMSNLRNKYETEINITKTTIKEISMQKEDDSKNLRNQLDRLSRENRDLKDEIVRLNDSILQATEQRRRAEENALQQKACGSEIMQKKQHLEIELKQVMQQRSEDNARHKQSLEEAAKTIQDKNKEIERLKAEFQEEAKRRWEYENELSKVRNNYDEEIISLKNQFETEINITKTTIHQLTMQKEEDTSGYRAQIDNLTRENRSLSEEIKRLKNTLTQTTENLRRVEEDIQQQKATGSEVSQRKQQLEVELRQVTQMRTEESVRYKQSLDDAAKTIQDKNKEIERLKQLIDKETNDRKCLEDENARLQRVQYDLQKANSSATETINKLKVQEQELTRLRIDYERVSQERTVKDQDITRFQNSLKELQLQKQKVEEELNRLKRTASEDSCKRKKLEEELEGMRRSLKEQAIKITNLTQQLEQASIVKKRSEDDLRQQRDVLDGHLREKQRTQEELRRLSSEVEALRRQLLQEQESVKQAHLRNEHFQKAIEDKSRSLNESKIEIERLQSLTENLTKEHLMLEEELRNLRLEYDDLRRGRSEADSDKNATILELRSQLQISNNRTLELQGLINDLQRERENLRQEIEKFQKQALEASNRIQESKNQCTQVVQERESLLVKIKVLEQDKARLQRLEDELNRAKSTLEAETRVKQRLECEKQQIQNDLNQWKTQYSRKEEAIRKIESEREKSEREKNSLRSEIERLQAEIKRIEERCRRKLEDSTRETQSQLETERSRYQREIDKLRQRPYGSHRETQTECEWTVDTSKLVFDGLRKKVTAMQLYECQLIDKTTLDKLLKGKKSVEEVASEIQPFLRGAGSIAGASASPKEKYSLVEAKRKKLISPESTVMLLEAQAATGGIIDPHRNEKLTVDSAIARDLIDFDDRQQIYAAEKAITGFDDPFSGKTVSVSEAIKKNLIDRETGMRLLEAQIASGGVVDPVNSVFLPKDVALARGLIDRDLYRSLNDPRDSQKNFVDPVTKKKVSYVQLKERCRIEPHTGLLLLSVQKRSMSFQGIRQPVTVTELVDSGILRPSTVNELESGQISYDEVGERIKDFLQGSSCIAGIYNETTKQKLGIYEAMKIGLVRPGTALELLEAQAATGFIVDPVSNLRLPVEEAYKRGLVGIEFKEKLLSAERAVTGYNDPETGNIISLFQAMNKELIEKGHGIRLLEAQIATGGIIDPKESHRLPVDIAYKRGYFNEELSEILSDPSDDTKGFFDPNTEENLTYLQLKERCIKDEETGLCLLPLKEKKKQVQTSQKNTLRKRRVVIVDPETNKEMSVQEAYKKGLIDYETFKELCEQECEWEEITITGSDGSTRVVLVDRKTGSQYDIQDAIDKGLVDRKFFDQYRSGSLSLTQFADMISLKNGVGTSSSMGSGVSDDVFSSSRHESVSKISTISSVRNLTIRSSSFSDTLEESSPIAAIFDTENLEKISITEGIERGIVDSITGQRLLEAQACTGGIIHPTTGQKLSLQDAVSQGVIDQDMATRLKPAQKAFIGFEGVKGKKKMSAAEAVKEKWLPYEAGQRFLEFQYLTGGLVDPEVHGRISTEEAIRKGFIDGRAAQRLQDTSSYAKILTCPKTKLKISYKDAINRSMVEDITGLRLLEAASVSSKGLPSPYNMSSAPGSRSGSRSGSRSGSRSGSRSGSRRGSFDATGNSSYSYSYSFSSSSIGH

SEQ ID NO: 3 - DNA, 867 bp, Homo sapiens
  CDS (1)..(867)
gagccacatactggtctgctcttgctttcagtacagaagagaagcatgtccttccaaggaatcagacaacctgtgaccgtcactgagctagtagattctggtatattgagaccgtccactgtcaatgaactggaatctggtcagatttcttatgacgaggttggtgagagaattaaggacttcctccagggttcaagctgcatagcaggcatatacaatgagaccacaaaacagaagcttggcatttatgaggccatgaaaattggcttagtccgacctggtactgctctggagttgctggaagcccaagcagctactggctttatagtggatcctgttagcaacttgaggttaccagtggaggaagcctacaagagaggtctggtgggcattgagttcaaagagaagctcctgtctgcagaacgagctgtcactgggtataatgatcctgaaacaggaaacatcatctctttgttccaagccatgaataaggaactcatcgaaaagggccacggtattcgcttattagaagcacagatcgcaaccggggggatcattgacccaaaggagagccatcgtttaccagttgacatagcatataagaggggctatttcaatgaggaactcagtgagattctctcagatccaagtgatgataccaaaggattttttgaccccaacactgaagaaaatcttacctatctgcaactaaaagaaagatgcattaaggatgaggaaacagggctctgtcttctgcctctgaaagaaaagaagaaacaggtgcagacatcacaaaagaataccctcaggaagcgtagagtggtcatagttgacccagaaaccaataaagaaatgtctgttcaggag

SEQ ID NO: 4 - protein, 289 aa, Homo sapiens
EPHTGLLLLSVQKRSMSFQGIRQPVTVTELVDSGILRPSTVNELESGQISYDEVGERIKDFLQGSSCIAGIYNETTKQKLGIYEAMKIGLVRPGTALELLEAQAATGFIVDPVSNLRLPVEEAYKRGLVGIEFKEKLLSAERAVTGYNDPETGNIISLFQAMNKELIEKGHGIRLLEAQIATGGIIDPKESHRLPVDIAYKRGYFNEELSEILSDPSDDTKGFFDPNTEENLTYLQLKERCIKDEETGLCLLPLKEKKKQVQTSQKNTLRKRRVVIVDPETNKEMSVQE

SEQ ID NO: 5 - DNA, 768 bp, Homo sapiens
  CDS (1)..(768)
gaaccacatactggtctgctcttgctttcagtacagaagagaagcatgtccttccaaggaatcagacaacctgtgaccgtcactgagctagtagattctggtatattgagaccgtccactgtcaatgaactggaatctggtcagatttcttatgacgaggttggtgagagaattaaggacttcctccagggttcaagctgcatagcaggcatatacaatgagaccacaaaacagaagcttggcatttatgaggccatgaaaattggcttagtccgacctggtactgctctggagttgctggaagcccaagcagctactggctttatagtggatcctgttagcaacttgaggttaccagtggaggaagcctacaagagaggtctggtgggcattgagttcaaagagaagctcctgtctgcagaacgagctgtcactgggtataatgatcctgaaacaggaaacatcatctctttgttccaagccatgaataaggaactcatcgaaaagggccacggtattcgcttattagaagcacagatcgcaaccggggggatcattgacccaaaggagagccatcgtttaccagttgacatagcatataagaggggctatttcaatgaggaactcagtgagattctctcagatccaagtgatgataccaaaggattttttgaccccaacactgaagaaaatcttacctatctgcaactaaaagaaagatgcattaaggatgaggaaacagggctctgtcttctgcctctgaaagaa

SEQ ID NO: 6 - protein, 256 aa, Homo sapiens
EPHTGLLLLSVQKRSMSFQGIRQPVTVTELVDSGILRPSTVNELESGQISYDEVGERIKDFLQGSSCIAGIYNETTKQKLGIYEAMKIGLVRPGTALELLEAQAATGFIVDPVSNLRLPVEEAYKRGLVGIEFKEKLLSAERAVTGYNDPETGNIISLFQAMNKELIEKGHGIRLLEAQIATGGIIDPKESHRLPVDIAYKRGYFNEELSEILSDPSDDTKGFFDPNTEENLTYLQLKERCIKDEETGLCLLPLKE

SEQ ID NO: 7 - DNA, 720 bp, Homo sapiens
  CDS (1)..(720)
tccttccaaggaatcagacaacctgtgaccgtcactgagctagtagattctggtatattgagaccgtccactgtcaatgaactggaatctggtcagatttcttatgacgaggttggtgagagaattaaggacttcctccagggttcaagctgcatagcaggcatatacaatgagaccacaaaacagaagcttggcatttatgaggccatgaaaattggcttagtccgacctggtactgctctggagttgctggaagcccaagcagctactggctttatagtggatcctgttagcaacttgaggttaccagtggaggaagcctacaagagaggtctggtgggcattgagttcaaagagaagctcctgtctgcagaacgagctgtcactgggtataatgatcctgaaacaggaaacatcatctctttgttccaagccatgaataaggaactcatcgaaaagggccacggtattcgcttattagaagcacagatcgcaaccggggggatcattgacccaaaggagagccatcgtttaccagttgacatagcatataagaggggctatttcaatgaggaactcagtgagattctctcagatccaagtgatgataccaaaggattttttgaccccaacactgaagaaaatcttacctatctgcaactaaaagaaagatgcattaaggatgaggaaacagggctctgtcttctgcctctgaaagaa

SEQ ID NO: 8 - protein, 240 aa, Homo sapiens
SFQGIRQPVTVTELVDSGILRPSTVNELESGQISYDEVGERIKDFLQGSSCIAGIYNETTKQKLGIYEAMKIGLVRPGTALELLEAQAATGFIVDPVSNLRLPVEEAYKRGLVGIEFKEKLLSAERAVTGYNDPETGNIISLFQAMNKELIEKGHGIRLLEAQIATGGIIDPKESHRLPVDIAYKRGYFNEELSEILSDPSDDTKGFFDPNTEENLTYLQLKERCIKDEETGLCLLPLKE

SEQ ID NO: 9 - DNA, 798 bp, Homo sapiens
  CDS (1)..(798)
agcagctctttttcagacaccctggaagaatcgagccccattgcagccatctttgacacagaaaacctggagaaaatctccattacagaaggtatagagcggggcatcgttgacagcatcacgggtcagaggcttctggaggctcaggcctgcacaggtggcatcatccacccaaccacgggccagaagctgtcacttcaggacgcagtctcccagggtgtgattgaccaagacatggccaccaggctgaagcctgctcagaaagccttcataggcttcgagggtgtgaagggaaagaagaagatgtcagcagcagaggcagtgaaagaaaaatggctcccgtatgaggctggccagcgcttcctggagttccagtacctcacgggaggtcttgttgacccggaagtgcatgggaggataagcaccgaagaagccatccggaaggggttcatagatggccgcgccgcacagaggctgcaagacaccagcagctatgccaaaatcctgacctgccccaaaaccaaattaaaaatatcctataaggatgccataaatcgctccatggtagaagatatcactgggctgcgccttctggaagccgcctccgtgtcgtccaagggcttacccagcccttacaacatgtcttcggctccggggtcccgctccggctcccgctcgggatctcgctccggatctcgctccgggtcccgcagtgggtcccggagaggaagctttgacgccacagggaattcttcctactcttattcctactcatttagcagtagttctattgggcac

SEQ ID NO: 10 - protein, 266 aa, Homo sapiens
SSSFSDTLEESSPIAAIFDTENLEKISITEGIERGIVDSITGQRLLEAQACTGGIIHPTTGQKLSLQDAVSQGVIDQDMATRLKPAQKAFIGFEGVKGKKKMSAAEAVKEKWLPYEAGQRFLEFQYLTGGLVDPEVHGRISTEEAIRKGFIDGRAAQRLQDTSSYAKILTCPKTKLKISYKDAINRSMVEDITGLRLLEAASVSSKGLPSPYNMSSAPGSRSGSRSGSRSGSRSGSRSGSRRGSFDATGNSSYSYSYSFSSSSIGH

SEQ ID NO: 11 - DNA, 768 bp, Homo sapiens
  CDS (1)..(768)
tcgagccccattgcagccatctttgacacagaaaacctggagaaaatctccattacagaaggtatagagcggggcatcgttgacagcatcacgggtcagaggcttctggaggctcaggcctgcacaggtggcatcatccacccaaccacgggccagaagctgtcacttcaggacgcagtctcccagggtgtgattgaccaagacatggccaccaggctgaagcctgctcagaaagccttcataggcttcgagggtgtgaagggaaagaagaagatgtcagcagcagaggcagtgaaagaaaaatggctcccgtatgaggctggccagcgcttcctggagttccagtacctcacgggaggtcttgttgacccggaagtgcatgggaggataagcaccgaagaagccatccggaaggggttcatagatggccgcgccgcacagaggctgcaagacaccagcagctatgccaaaatcctgacctgccccaaaaccaaattaaaaatatcctataaggatgccataaatcgctccatggtagaagatatcactgggctgcgccttctggaagccgcctccgtgtcgtccaagggcttacccagcccttacaacatgtcttcggctccggggtcccgctccggctcccgctcgggatctcgctccggatctcgctccgggtcccgcagtgggtcccggagaggaagctttgacgccacagggaattcttcctactcttattcctactcatttagcagtagttctattgggcac

SEQ ID NO: 12 - protein, 256 aa, Homo sapiens
SSPIAAIFDTENLEKISITEGIERGIVDSITGQRLLEAQACTGGIIHPTTGQKLSLQDAVSQGVIDQDMATRLKPAQKAFIGFEGVKGKKKMSAAEAVKEKWLPYEAGQRFLEFQYLTGGLVDPEVHGRISTEEAIRKGFIDGRAAQRLQDTSSYAKILTCPKTKLKISYKDAINRSMVEDITGLRLLEAASVSSKGLPSPYNMSSAPGSRSGSRSGSRSGSRSGSRSGSRRGSFDATGNSSYSYSYSFSSSSIGH

SEQ ID NO: 13 - DNA, 588 bp, Homo sapiens
  CDS (1)..(588)
tcgagccccattgcagccatctttgacacagaaaacctggagaaaatctccattacagaaggtatagagcggggcatcgttgacagcatcacgggtcagaggcttctggaggctcaggcctgcacaggtggcatcatccacccaaccacgggccagaagctgtcacttcaggacgcagtctcccagggtgtgattgaccaagacatggccaccaggctgaagcctgctcagaaagccttcataggcttcgagggtgtgaagggaaagaagaagatgtcagcagcagaggcagtgaaagaaaaatggctcccgtatgaggctggccagcgcttcctggagttccagtacctcacgggaggtcttgttgacccggaagtgcatgggaggataagcaccgaagaagccatccggaaggggttcatagatggccgcgccgcacagaggctgcaagacaccagcagctatgccaaaatcctgacctgccccaaaaccaaattaaaaatatcctataaggatgccataaatcgctccatggtagaagatatcactgggctgcgccttctggaagccgcctccgtgtcgtccaag

SEQ ID NO: 14 - protein, 196 aa, Homo sapiens
SSPIAAIFDTENLEKISITEGIERGIVDSITGQRLLEAQACTGGIIHPTTGQKLSLQDAVSQGVIDQDMATRLKPAQKAFIGFEGVKGKKKMSAAEAVKEKWLPYEAGQRFLEFQYLTGGLVDPEVHGRISTEEAIRKGFIDGRAAQRLQDTSSYAKILTCPKTKLKISYKDAINRSMVEDITGLRLLEAASVSSK

SEQ ID NO: 15 - DNA, 12186 bp, Homo sapiens
  CDS (1)..(12186)
atgtctactctcctggaaaacatctttgccataattaatcttttcaagcaatattcaaaaaaagataaaaacactgacacattgagtaaaaaagagctgaaggaacttctggaaaaggaatttcggcaaatcctgaagaatccagatgacccagatatggttgatgtcttcatggatcacttggatatagaccacaacaagaaaattgacttcactgagtttcttctgatggtattcaagttggctcaagcatattatgagtctaccagaaaagagaatttaccgatatcaggacacaagcacagaaagcacagtcatcatgataaacatgaagataataaacaggaagaaaacaaagaaaacagaaaaagaccctcaagtctggaaagaagaaacaatagaaaagggaataagggaagatccaagagcccaagagaaacaggggggaaaaggcatgaatctagttctgaaaaaaaagaaagaaaaggatattcacctactcatagagaagaagaatatggaaaaaaccatcataactcaagtaaaaaagagaaaaacaagactgaaaatactagattaggagacaataggaagaggctaagtgaaagacttgaagagaaagaagacaatgaagaaggagtatatgattatgaaaatacaggaagaatgactcaaaaatggatacaatcaggccatattgccacatattacacaatccaggatgaagcctatgacaccactgatagtctattagaagaaaacaaaatatatgaaagatcaaggtcatctgatggcaaatcatcatctcaagtgaacaggtcaagacatgaaaatacaagccaggtaccattgcaggagtccaggacaagaaagcgtaggggatccagagttagccaggacagggacagtgagggacactcagaagactctgagaggcactctgggtcggcttccagaaaccatcatggatctgcgtgggagcagtcaagagatggctccagacaccccaggtcccatgatgaagacagagccagtcatgggcactctgcagacagctccagacaatcaggcactcgtcacgcagagacttcctctcgtggacagactgcatcatcccatgaacaggcaagatcaagtccaggagaaagacatggatccggccaccagcagtcagcagacagctccagacactcagccactgggcgcgggcaagcttcatctgcagtcagcgatcgtggacaccgggggtctagcggtagtcaggccagtgacagtgagggacattcagaaaactcagacacacaatcagtgtcaggccacggaaaggctgggctgagacagcagagccaccaagagtccacacgtggccggtcaggggaacggtctggacgttcagggtcttccctctaccaggtgagcactcatgaacagcctgactctgcccatggacggaccgggaccagcactggaggaagacaaggatcgcaccacgagcaggcacgagacagctccaggcattcagcgtcccaagagggtcaggacaccattcgtggacacccggggtcaagcagaggaggaaggcagggatcccaccacgagcaatcggtaaataggtctggacactcaggttcccatcacagccacaccacatcccagggaaggtctgatgcctcccatgggcagtcaggatccagaagtgcaagcagacaaacacgaaatgaggaacaatcaggagacggcaccaggcactcagggtcacgtcatcatgaagcttcctctcaggctgacagctctagacactcacaggtgggccagggacaatcatcggggcccaggacaagtaggaaccagggatccagtgttagccaggacagtgacagtcagggacactcagaagactctgagaggtggtctgggtctgcttccagaaaccatcatggatctgctcaggagcagtcaagagatggctccagacaccccaggtcccatcacgaagacagagctggtcatgggcactctgcagacagctccagaaaatcaggcactcgtcacacacagaattcctctagtggacaggctgcgtcatcccatgaacaggcaagatcaagtgcaggagaaagacatggatcccgccaccagctccagtcagcagacagctccagacactcaggcactgggcacggacaagcttcatctgcagtcagagacagtggacaccgagggtccagtggtagtcaggccactgacagtgagggacattcagaagactcagacacacagtcagtgtcaggccatggacaggctggtcaccatcagcagagccaccaagagtccgcacgtgaccggtcaggggaaaggtctcgacgttcagggtctttcctctaccaggtgagcactcataaacagtctgagtcctcccatggatggacagggcccagcactggagtaagacaaggatcccaccatgagcaggcacgagacaactccaggcactcagcatcccaagatggtcaggacaccattcgtggacacccggggtcaagcagaagaggaaggcaggggtcccaccacgagcaatcggtagataggtctggacactcagggtcccatcacagccacaccacatcccagggaaggtctgatgcctcccgtgggcagtcaggatccagaagtgcaagcagaacaacacgtaatgaggaacaatcaagagacggctccaggcactcagggtcacgtcaccatgaagcttcctctcatgccgacatctctagacactcacaggcaggccagggacaatcagaggggtccaggacaagcaggcgccagggatccagtgttagccaggacagtgacagtgagggacattcagaagactctgagaggtggtctgggtctgcttccagaaaccatcgtggatctgctcaggagcagtcaagacatggctccagacaccccaggtcccatcacgaagacagagccggtcacgggcactctgcagacagctccagacaatcaggaactcctcacgcagagacttcctctggtggacaggctgcgtcatcccatgaacaggcaagatcaagtccaggagaaagacacggatcccgccaccagcagtcagcagacagctccagacactcaggcattccgcgcagacaagcttcatctgcagtcagagacagtggacactgggggtccagtggtagtcaggccagtgatagtgagggacattcagaggagtcagacacacagtcagtgtcaggccatggacaggatgggccccatcagcagagccaccaagagtccgcacgtgactggtcagggggaaggtctggacgttcagggtctttcatctaccaggtgagcactcatgaacagtctgagtctgcccatgggcggaccaggaccagcactggacgaagacaaggatcccaccacgagcaggcacgagacagctccaggcactcagcgtcccaagagggtcaggacaccattcgtgcacacccggggtcaaggagaggaggaaggcagggatcccaccatgagcaatcggtagatagatctggacactcagggtcccatcacagccacaccacatcccagggaaggtctgatgcctcccatgggcagtcaggatccagaagtgcaagcagacaaactcgtaaggacaaacaatcaggagacggctccaggcactcagggtcacgtcaccatgaagctgcctcttgggctgacagctctagacactcacaggtgggacaggaacaatcatcggggtccaggacaagcaggcaccagggatccagtgttagccaggacagtgacagtgagagacactcagacgactccgagaggttgtctgggtctgcttccagaaaccatcatggatcttctcgggagcagtcaagagatggctccagacaccctgggttccatcaagaagacagagccagtcacgggcactctgcagacagctccagacaatcaggcactcatcacacagagtcttcctctcatggacaggctgtgtcatcccatgaacaggcaagatcaagtccaggagaaagacatggatcccgccaccagcagtcagcagacagctccagacactcaggcattgggcacagacaagcttcatctgcagtcagagacagtggacaccgagggtccagtggtagtcaggtcactaacagtgagggacattcagaagactcagacacacagtcagtgtcagcccacggacaagctgggccccatcagcagagccacaaagagtccgcacgtggccagtcaggggaaagctctggacgttcaaggtctttcctctaccaggtgagctctcatgaacagtctgagtccacacacggacagactgcacccagcactggaggaagacaaggatcccgccatgagcaggcacgaaacagctctaggcactcagcatcccaagacggtcaggacaccattcgtggacacccggggtcaagcagaggaggaaggcagggatcctaccacgagcaatcagtagataggtctggacactcagggtaccatcacagccacaccacaccccagggaaggtctgatgcctcccatgggcagtcaggacccagaagtgcaagcaggcaaacaagaaatgaggaacaatcaggagacggctccaggcactcagggtcacgtcaccatgaaccttccactcgggccggcagctctagacactcacaggtgggccagggagaatcagcggggtccaagacaagcaggcgccagggatccagtgttagtcaggacagggacagtgagggacactcagaagactctgagaggcggtctgagtcggcttccagaaaccattatggatctgctcgggagcagtcaagacatggctccaggaaccccaggtcccatcaagaagatagagccagtcatgggcactctgcagagagctccagacaatcaggcactcgtcatgcagagacttcctctggtggacaggctgcatcatcccaggaacaggcaaggtcaagtccaggagaaagacatggatcccgccaccagcagtcagcagacagctccacagactcaggcactgggcgcagacaagattcatctgtagtcggagacagtggaaaccgagggtccagtggtagccaggccagtgacagcgagggacactcagaagagtcagacacacagtcagtgtcagcccacggacaggctgggccccatcagcagagccaccaagagtccacacgtggccagtcaggggaaaggtctggacgttcagggtctttcctctaccaggtgagcactcatgaacagtctgagtccgcccatggacgcacagggcccagcactggaggaagacaaagatcccgccacgagcaggcacgagacagctccaggcactcagcgtcccaagagggtcaggacaccattcgtggacacccagggtcaagcagaggaggaaggcagggatcccactatgagcaatcggtagatagttctggacactcagggtctcatcacagccacaccacgtcccaggaaaggtctgatgtctcccgtgggcagtcaggatccagaagtgtcagcagacaaacacgtaatgagaaacaatcaggagacggctccaggcactcagggtcgcgtcaccatgaagcttcctctcgggccgacagctctagacactcgcaggtgggccagggacaatcatcagggcccaggacaagcaggaaccagggatccagtgttagccaggacagtgacagtcagggacactcagaagactctgagaggtggtctgggtctgcttccagaaaccatcttggatctgcttgggagcagtcaagagatggctccagacaccctgggtcccatcacgaagacagagccggtcacgggcactctgcagacagctccagacaatcaggcactcgtcacacagagtcttcctctcgtggacaggctgcgtcatcccatgaacaggcaagatcaagtgcaggagaaagacatggatcccaccaccagctccagtcagcagacagctccagacactcaggcattgggcatggacaagcttcatctgcagtcagagacagtggacaccgagggtacagtggtagtcaggccagtgacagtgagggacattcagaagactcagacacacagtcagtgtcagcacagggaaaagctgggccccatcagcagagccacaaagagtccgcacgtggccagtcaggggaaagctctggacgttcagggtctttcctctaccaggtgagcactcatgaacagtctgagtccacccatggacagtctgcgcccagcactggaggaagacaaggatcccattatgatcaggcacaagacagctccaggcactcagcatcccaagagggtcaggacaccattcgtggacacccggggccaagcagaggaggaagacaggggtcccaccaagagcaatcggtagataggtctggacactcagggtctcatcacagccacaccacatcccagggaaggtctgatgcctcccgtgggcagtcaggatccagaagtgcaagcagaaaaacatatgacaaggaacaatcaggagatggctctaggcactcagggtcgcatcatcatgaagcttcctcttgggccgacagctctagacactcactggtgggccagggacaatcatcagggcccaggacaagcaggccccggggatccagtgttagccaggacagtgacagtgagggacactcagaagattctgagaggcggtctgggtctgcgtccagaaaccatcatggatctgctcaggagcagtcaagagatggctccagacaccccaggtcccatcacgaagacagagccggtcatgggcactctgcagagagctccagacaatcaggcactcatcatgcagagaattcctctggtggacaggctgcatcatcccatgaacaggcaagatcaagtgcaggagagagacacggatcccaccaccagcagtcagcagacagctccagacactcaggcattgggcacggacaagcttcatctgcagtcagagacagtggacaccgagggtccagtggtagtcaggccagtgacagtgagggacattcagaagactcagacacacagtcagtgtcagcccacggacaggctgggccccatcagcagagccaccaagagtccacacgtggccggtcagcaggaaggtctggacgttcagggtctttcctctaccaggtgagcactcatgaacagtctgagtccgcccatggacggaccgggaccagcactggaggaagacaaggatcccaccacaagcaggcacgagacagctccaggcactcaacgtcccaagagggtcaggacaccattcatggacacccggggtcaagcagtggaggaaggcagggatcccactacgagcaattggtagatagatctggacactcagggtctcatcacagccacaccacatcccagggaaggtctgatgcctcccatgggcactcaggatccagaagtgcaagcagacaaactcgtaacgatgaacaatcaggagacggctccaggcactcagggtcgcgtcaccatgaagcttcctctcgggccgacagctctggacactcgcaggtgggccagggacaatcagaggggcccaggacaagcaggaactggggatccagttttagccaggacagtgacagtcagggacactcagaagactctgagaggtggtctgggtctgcttccagaaaccatcatggatctgctcaggagcagctaagagatggctccagacaccccaggtcccatcaagaagacagagctggtcatgggcactctgcagacagctccagacaatcaggcactcgtcacacacagacttcctctggtggacaggctgcatcatcccatgaacaggcaagatcaagtgcaggagaaagacatggatcccaccaccagcagtcagcagacagctccagacactcaggcattgggcacggacaagcttcatctgcagtcagagacagtggacaccgagggtacagtggtagtcaggccagtgacaatgagggacattcagaagactcagacacacagtcagtgtcagcccacggacaggctgggtcccatcagcagagccaccaagagtccgcacgtggccggtcaggggaaacgtctggacattcaggatctttcctctaccaggtgagcactcatgaacagtctgagtcctcccatggatggacggggcccagcactagaggaagacaaggatcccgccatgagcaggcacaagacagctccaggcactcagcatcccaagacggtcaggacaccattcgtggacacccggggtcaagcagaggaggaaggcaggggtaccaccacgagcattcggtagatagctctggacactcagggtcccatcacagccacaccacatcccagggaaggtctgatgcctcccgtgggcagtcaggatccagaagtgcaagcagaacaacacgtaatgaggaacaatcaggagacggctccaggcactcagggtcgcgtcaccatgaagcttccactcatgccgacatctctagacactcacaggcagtccagggacaatcagaggggtccaggagaagcaggcgccagggatccagtgtgagccaggacagtgacagtgagggacattcagaagactctgagaggtggtctgggtctgcttccagaaaccatcatggatctgctcaggagcagctaagagatggctccagacaccccaggtcccatcaagaagacagagctggtcatgggcactctgcagacagctccagacaatcaggcactcgtcacacacagacttcctctggtggacaggctgcatcatcccatgaacaggcaagatcaagtgcaggagaaagacatggatcccaccaccagcagtcagcagacagctccagacactcaggcattgggcacggacaagcttcatctgcagtcagagacagtggacaccgagggtacagtggtagtcaggccagtgacaatgagggacattcagaagactcagacacacagtcagtgtcagcccacggacaggctgggtcccatcagcagagccaccaagagtccgcacgtggccggtcaggggaaacgtctggacattcaggatctttcctctaccaggtgagcactcatgaacagtctgagtcctcccatggatggacggggcccagcactagaggaagacaaggatcccgccatgagcaggcacaagacagctccaggcactcagcatcccaatacggtcaggacaccattcgtggacacccggggtcaagcagaggaggaaggcaggggtaccaccacgagcattcggtagatagctctggacactcagggtcccatcacagccacaccacatcccagggaaggtctgatgcctcccgtgggcagtcaggatccagaagtgcaagcagaacaacacgtaatgaggaacaatcaggagacagctccaggcactcagtgtcacgtcaccatgaagcttccactcatgccgacatctctagacactcacaggcagtccagggacaatcagaggggtccaggagaagcaggcgccagggatccagtgtgagccaggacagtgacagtgagggacattcagaagactctgagaggtggtctgggtctgcttccagaaaccatcgtggatctgttcaggagcagtcaaggcacggctccagacaccccaggtcccatcacgaagacagagccggtcacgggcactctgcagaccgctccagacaatcaggcactcgtcacgcagagacttcctctggtggacaggctgcatcatcccatgaacaggcaagatcaagtccaggagagagacacggatcccgccaccagcagtcagcagacagctccagacactcaggcattccgcgtggacaagcttcatctgcagtcagagacagtagacactgggggtccagtggtagtcaggccagtgatagtgagggacattcagaagagtcagacacacagtcagtgtcaggccatggacaggctgggccccatcagcagagccaccaagagtccgcacgtgaccggtcagggggaaggtctggacgttcagggtctttcctctaccaggtgagcactcatgaacagtctgagtctgcccatgggcggaccaggaccagcactggacgaagacaaggatcccaccacgagcaggcacgagacagctccaggcactcagcgtcccaagagggtcaggacaccattcgtggacacccggggtcaagcagaagaggaaggcagggatcccactacgagcaatcggtagataggtctggacactcagggtcccatcacagccacaccacatcccagggaaggtctgatgcctcccgtgggcagtcaggatccagaagtgccagcagacaaactcgtaatgacgaacaatcaggagatggctccaggcactcatggtcgcatcaccatgaagcttccactcaggcggacagctctagacactcacagtccggccagggacaatcagcggggcccaggacaagcaggaaccagggatccagtgttagccaggacagtgacagtcagggacactcagaagactctgagaggtggtctgggtctgcttccagaaaccatcgtggatctgctcaggagcagtcaagagatggctccagacaccccacgtcccatcacgaagacagagccggtcacgggcactctgcagagagctccagacaatcaggcactcatcatgcagagaattcctctggtggacaggctgcatcatcccatgaacaggcaagatcaagtgcaggagagagacatggatcccaccaccagcagtcagcagacagctccagacactcaggcattgggcacggacaagcttcatctgcagtcagagacagtggacaccgagggtccagtggtagtcaggccagtgacagtgagggacattcagaagactcagacacacagtcagtgtcagcccacggacaggctgggccccatcagcagagccaccaagagtccacacgtggccggtcagcaggaaggtctggacgttcagggtctttcctctaccaggtgagcactcatgaacagtctgagtctgcccatggacgggctgggcccagtactggaggaagacaaggatcccgccacgagcaggcacgagacagctccaggcactcagcgtcccaagagggtcaggacaccattcgtggacacccggggtcaaggagaggaggaagacagggatcctaccacgagcaatcggtagataggtctggacactcagggtcccatcacagccacaccacatcccagggaaggtctgatgcctcccatgggcagtcaggatccagaagtgcaagcagagaaacacgtaatgaggaacagtcaggagacggctccaggcactcagggtcgcgtcaccatgaagcttccactcaggctgacagctctagacactcacagtccggccagggtgaatcagcggggtccaggagaagcaggcgccagggatccagtgttagccaggacagtgacagtgaggcatacccagaggactctgagaggcgatctgagtctgcttccagaaaccatcatggatcttctcgggagcagtcaagagatggctccagacaccccggatcctctcaccgcgatacagccagtcatgtacagtcttcacctgtacagtcagactctagtaccgctaaggaacatggtcactttagtagtctttcacaagattctgcgtatcactcaggaatacagtcacgtggcagtcctcacagttctagttcttatcattatcaatctgagggcactgaaaggcaaaaaggtcaatcaggtttagtttggagacatggcagctatggtagtgcagattatgattatggtgaatccgggtttagacactctcagcacggaagtgttagttacaattccaatcctgttgttttcaaggaaagatctgatatctgtaaagcaagtgcgtttggtaaagatcatccaaggtattatgcaacgtatattaataaggacccaggtttatgtggccattctagtgatatatcgaaacaactgggatttagtcagtcacagagatactattactatgagtaa

SEQ ID NO: 16 - protein, 4061 aa, Homo sapiens
MSTLLENIFAIINLFKQYSKKDKNTDTLSKKELKELLEKEFRQILKNPDDPDMVDVFMDHLDIDHNKKIDFTEFLLMVFKLAQAYYESTRKENLPISGHKHRKHSHHDKHEDNKQEENKENRKRPSSLERRNNRKGNKGRSKSPRETGGKRHESSSEKKERKGYSPTHREEEYGKNHHNSSKKEKNKTENTRLGDNRKRLSERLEEKEDNEEGVYDYENTGRMTQKWIQSGHIATYYTIQDEAYDTTDSLLEENKIYERSRSSDGKSSSQVNRSRHENTSQVPLQESRTRKRRGSRVSQDRDSEGHSEDSERHSGSASRNHHGSAWEQSRDGSRHPRSHDEDRASHGHSADSSRQSGTRHAETSSRGQTASSHEQARSSPGERHGSGHQQSADSSRHSATGRGQASSAVSDRGHRGSSGSQASDSEGHSENSDTQSVSGHGKAGLRQQSHQESTRGRSGERSGRSGSSLYQVSTHEQPDSAHGRTGTSTGGRQGSHHEQARDSSRHSASQEGQDTIRGHPGSSRGGRQGSHHEQSVNRSGHSGSHHSHTTSQGRSDASHGQSGSRSASRQTRNEEQSGDGTRHSGSRHHEASSQADSSRHSQVGQGQSSGPRTSRNQGSSVSQDSDSQGHSEDSERWSGSASRNHHGSAQEQSRDGSRHPRSHHEDRAGHGHSADSSRKSGTRHTQNSSSGQAASSHEQARSSAGERHGSRHQLQSADSSRHSGTGHGQASSAVRDSGHRGSSGSQATDSEGHSEDSDTQSVSGHGQAGHHQQSHQESARDRSGERSRRSGSFLYQVSTHKQSESSHGWTGPSTGVRQGSHHEQARDNSRHSASQDGQDTIRGHPGSSRRGRQGSHHEQSVDRSGHSGSHHSHTTSQGRSDASRGQSGSRSASRTTRNEEQSRDGSRHSGSRHHEASSHADISRHSQAGQGQSEGSRTSRRQGSSVSQDSDSEGHSEDSERWSGSASRNHRGSAQEQSRHGSRHPRSHHEDRAGHGHSADSSRQSGTPHAETSSGGQAASSHEQARSSPGERHGSRHQQSADSSRHSGIPRRQASSAVRDSGHWGSSGSQASDSEGHSEESDTQSVSGHGQDGPHQQSHQESARDWSGGRSGRSGSFIYQVSTHEQSESAHGRTRTSTGRRQGSHHEQARDSSRHSASQEGQDTIRAHPGSRRGGRQGSHHEQSVDRSGHSGSHHSHTTSQGRSDASHGQSGSRSASRQTRKDKQSGDGSRHSGSRHHEAASWADSSRHSQVGQEQSSGSRTSRHQGSSVSQDSDSERHSDDSERLSGSASRNHHGSSREQSRDGSRHPGFHQEDRASHGHSADSSRQSGTHHTESSSHGQAVSSHEQARSSPGERHGSRHQQSADSSRHSGIGHRQASSAVRDSGHRGSSGSQVTNSEGHSEDSDTQSVSAHGQAGPHQQSHKESARGQSGESSGRSRSFLYQVSSHEQSESTHGQTAPSTGGRQGSRHEQARNSSRHSASQDGQDTIRGHPGSSRGGRQGSYHEQSVDRSGHSGYHHSHTTPQGRSDASHGQSGPRSASRQTRNEEQSGDGSRHSGSRHHEPSTRAGSSRHSQVGQGESAGSKTSRRQGSSVSQDRDSEGHSEDSERRSESASRNHYGSAREQSRHGSRNPRSHQEDRASHGHSAESSRQSGTRHAETSSGGQAASSQEQARSSPGERHGSRHQQSADSSTDSGTGRRQDSSVVGDSGNRGSSGSQASDSEGHSEESDTQSVSAHGQAGPHQQSHQESTRGQSGERSGRSGSFLYQVSTHEQSESAHGRTGPSTGGRQRSRHEQARDSSRHSASQEGQDTIRGHPGSSRGGRQGSHYEQSVDSSGHSGSHHSHTTSQERSDVSRGQSGSRSVSRQTRNEKQSGDGSRHSGSRHHEASSRADSSRHSQVGQGQSSGPRTSRNQGSSVSQDSDSQGHSEDSERWSGSASRNHLGSAWEQSRDGSRHPGSHHEDRAGHGHSADSSRQSGTRHTESSSRGQAASSHEQARSSAGERHGSHHQLQSADSSRHSGIGHGQASSAVRDSGHRGYSGSQASDSEGHSEDSDTQSVSAQGKAGPHQQSHKESARGQSGESSGRSGSFLYQVSTHEQSESTHGQSAPSTGGRQGSHYDQAQDSSRHSASQEGQDTIRGHPGPSRGGRQGSHQEQSVDRSGHSGSHHSHTTSQGRSDASRGQSGSRSASRKTYDKEQSGDGSRHSGSHHHEASSWADSSRHSLVGQGQSSGPRTSRPRGSSVSQDSDSEGHSEDSERRSGSASRNHHGSAQEQSRDGSRHPRSHHEDRAGHGHSAESSRQSGTHHAENSSGGQAASSHEQARSSAGERHGSHHQQSADSSRHSGIGHGQASSAVRDSGHRGSSGSQASDSEGHSEDSDTQSVSAHGQAGPHQQSHQESTRGRSAGRSGRSGSFLYQVSTHEQSESAHGRTGTSTGGRQGSHHKQARDSSRHSTSQEGQDTIHGHPGSSSGGRQGSHYEQLVDRSGHSGSHHSHTTSQGRSDASHGHSGSRSASRQTRNDEQSGDGSRHSGSRHHEASSRADSSGHSQVGQGQSEGPRTSRNWGSSFSQDSDSQGHSEDSERWSGSASRNHHGSAQEQLRDGSRHPRSHQEDRAGHGHSADSSRQSGTRHTQTSSGGQAASSHEQARSSAGERHGSHHQQSADSSRHSGIGHGQASSAVRDSGHRGYSGSQASDNEGHSEDSDTQSVSAHGQAGSHQQSHQESARGRSGETSGHSGSFLYQVSTHEQSESSHGWTGPSTRGRQGSRHEQAQDSSRHSASQDGQDTIRGHPGSSRGGRQGYHHEHSVDSSGHSGSHHSHTTSQGRSDASRGQSGSRSASRTTRNEEQSGDGSRHSGSRHHEASTHADISRHSQAVQGQSEGSRRSRRQGSSVSQDSDSEGHSEDSERWSGSASRNHHGSAQEQLRDGSRHPRSHQEDRAGHGHSADSSRQSGTRHTQTSSGGQAASSHEQARSSAGERHGSHHQQSADSSRHSGIGHGQASSAVRDSGHRGYSGSQASDNEGHSEDSDTQSVSAHGQAGSHQQSHQESARGRSGETSGHSGSFLYQVSTHEQSESSHGWTGPSTRGRQGSRHEQAQDSSRHSASQYGQDTIRGHPGSSRGGRQGYHHEHSVDSSGHSGSHHSHTTSQGRSDASRGQSGSRSASRTTRNEEQSGDSSRHSVSRHHEASTHADISRHSQAVQGQSEGSRRSRRQGSSVSQDSDSEGHSEDSERWSGSASRNHRGSVQEQSRHGSRHPRSHHEDRAGHGHSADRSRQSGTRHAETSSGGQAASSHEQARSSPGERHGSRHQQSADSSRHSGIPRGQASSAVRDSRHWGSSGSQASDSEGHSEESDTQSVSGHGQAGPHQQSHQESARDRSGGRSGRSGSFLYQVSTHEQSESAHGRTRTSTGRRQGSHHEQARDSSRHSASQEGQDTIRGHPGSSRRGRQGSHYEQSVDRSGHSGSHHSHTTSQGRSDASRGQSGSRSASRQTRNDEQSGDGSRHSWSHHHEASTQADSSRHSQSGQGQSAGPRTSRNQGSSVSQDSDSQGHSEDSERWSGSASRNHRGSAQEQSRDGSRHPTSHHEDRAGHGHSAESSRQSGTHHAENSSGGQAASSHEQARSSAGERHGSHHQQSADSSRHSGIGHGQASSAVRDSGHRGSSGSQASDSEGHSEDSDTQSVSAHGQAGPHQQSHQESTRGRSAGRSGRSGSFLYQVSTHEQSESAHGRAGPSTGGRQGSRHEQARDSSRHSASQEGQDTIRGHPGSRRGGRQGSYHEQSVDRSGHSGSHHSHTTSQGRSDASHGQSGSRSASRETRNEEQSGDGSRHSGSRHHEASTQADSSRHSQSGQGESAGSRRSRRQGSSVSQDSDSEAYPEDSERRSESASRNHHGSSREQSRDGSRHPGSSHRDTASHVQSSPVQSDSSTAKEHGHFSSLSQDSAYHSGIQSRGSPHSSSSYHYQSEGTERQKGQSGLVWRHGSYGSADYDYGESGFRHSQHGSVSYNSNPVVFKERSDICKASAFGKDHPRYYATYINKDPGLCGHSSDISKQLGFSQSQRYYYYE

SEQ ID NO: 17 - DNA, 2178 bp, Homo sapiens
  CDS (1)..(2178)
atgaaccactcgccgctcaagaccgccttggcgtacgaatgcttccaggaccaggacaactccacgttggctttgccgtcggaccaaaagatgaaaacaggcacgtctggcaggcagcgcgtgcaggagcaggtgatgatgaccgtcaagcggcagaagtccaagtcttcccagtcgtccaccctgagccactccaatcgaggttccatgtatgatggcttggctgacaattacaactatgggaccaccagcaggagcagctactactccaagttccaggcagggaatggctcatggggatatccgatctacaatggaaccctcaagcgggagcctgacaacaggcgcttcagctcctacagccagatggagaactggagccggcactacccccggggcagctgtaacaccaccggcgcaggcagcgacatctgcttcatgcagaaaatcaaggcgagccgcagtgagcccgacctctactgtgacccacggggcaccctgcgcaagggcacgctgggcagcaagggccagaagaccacccagaaccgctacagcttttacagcacctgcagtggtcagaaggccataaagaagtgccctgtgcgcccgccctcttgtgcctccaagcaggaccctgtgtatatcccgcccatctcctgcaacaaggacctgtcctttggccactctagggccagctccaagatctgcagtgaggacatcgagtgcagtgggctgaccatccccaaggctgtgcagtacctgagctcccaggatgagaagtaccaggccattggggcctattacatccagcatacctgcttccaggatgaatctgccaagcaacaggtctatcagctgggaggcatctgcaagctggtggacctcctccgcagccccaaccagaacgtccagcaggccgcggcaggggccctgcgcaacctggtgttcaggagcaccaccaacaagctggagacccggaggcagaatgggatccgcgaggcagtcagcctcctgaggagaaccgggaacgccgagatccagaagcagctgactgggctgctctggaacctgtcttccactgacgagctgaaggaggaactcattgccgacgccctgcctgttctggccgaccgcgtcatcattcccttctctggctggtgcgatggcaatagcaacatgtcccgggaagtggtggaccctgaggtcttcttcaatgccacaggctgcttgaggaacctgagctcggccgatgcaggccgccagaccatgcgtaactactcagggctcattgattccctcatggcctatgtccagaactgtgtagcggccagccgctgtgacgacaagtctgtggaaaactgcatgtgtgttctgcacaacctctcctaccgcctggacgccgaggtgcccacccgctaccgccagctggagtataacgcccgcaacgcctacaccgagaagtcctccactggctgcttcagcaacaagagcgacaagatgatgaacaacaactatgactgccccctgcctgaggaagagaccaaccccaagggcagcggctggttgtaccattcagatgccatccgcacctacctgaacctcatgggcaagagcaagaaagatgctaccctggaggcctgtgctggtgccctgcagaacctgacagccagcaaggggctgatgtccagtggcatgagccagttgattgggctgaaggaaaagggcctgccacaaattgcccgcctcctgcaatctggcaactctgatgtggtgcggtccggagcctccctcctgagcaacatgtcccgccaccctctgctgcacagagtgatggggaaccaggtgttcccggaggtgaccaggctcctcaccagccacactggcaataccagcaactccgaagacatcttgtcctcggcctgctacactgtgaggaacctgatggcctcgcagccacaactggccaagcagtacttctccagcagcatgctcaacaacatcatcaacctgtgccgaagcagtgcctcacccaaggccgcagaagctgcccggcttctcctgtctgacatgtggtccagcaaggaactgcagggtgtcctcagacagcaaggtttcgataggaacatgctgggaaccttagctggggccaacagcctcaggaacttcacctcccgattc

SEQ ID NO: 18 - protein, 726 aa, Homo sapiens
MNHSPLKTALAYECFQDQDNSTLALPSDQKMKTGTSGRQRVQEQVMMTVKRQKSKSSQSSTLSHSNRGSMYDGLADNYNYGTTSRSSYYSKFQAGNGSWGYPIYNGTLKREPDNRRFSSYSQMENWSRHYPRGSCNTTGAGSDICFMQKIKASRSEPDLYCDPRGTLRKGTLGSKGQKTTQNRYSFYSTCSGQKAIKKCPVRPPSCASKQDPVYIPPISCNKDLSFGHSRASSKICSEDIECSGLTIPKAVQYLSSQDEKYQAIGAYYIQHTCFQDESAKQQVYQLGGICKLVDLLRSPNQNVQQAAAGALRNLVFRSTTNKLETRRQNGIREAVSLLRRTGNAEIQKQLTGLLWNLSSTDELKEELIADALPVLADRVIIPFSGWCDGNSNMSREVVDPEVFFNATGCLRNLSSADAGRQTMRNYSGLIDSLMAYVQNCVAASRCDDKSVENCMCVLHNLSYRLDAEVPTRYRQLEYNARNAYTEKSSTGCFSNKSDKMMNNNYDCPLPEEETNPKGSGWLYHSDAIRTYLNLMGKSKKDATLEACAGALQNLTASKGLMSSGMSQLIGLKEKGLPQIARLLQSGNSDVVRSGASLLSNMSRHPLLHRVMGNQVFPEVTRLLTSHTGNTSNSEDILSSACYTVRNLMASQPQLAKQYFSSSMLNNIINLCRSSASPKAAEAARLLLSDMWSSKELQGVLRQQGFDRNMLGTLAGANSLRNFTSRF

SEQ ID NO: 19 - DNA, 2241 bp, Homo sapiens
  CDS (1)..(2241)
atgaaccactcgccgctcaagaccgccttggcgtacgaatgcttccaggaccaggacaactccacgttggctttgccgtcggaccaaaagatgaaaacaggcacgtctggcaggcagcgcgtgcaggagcaggtgatgatgaccgtcaagcggcagaagtccaagtcttcccagtcgtccaccctgagccactccaatcgaggttccatgtatgatggcttggctgacaattacaactatgggaccaccagcaggagcagctactactccaagttccaggcagggaatggctcatggggatatccgatctacaatggaaccctcaagcgggagcctgacaacaggcgcttcagctcctacagccagatggagaactggagccggcactacccccggggcagctgtaacaccaccggcgcaggcagcgacatctgcttcatgcagaaaatcaaggcgagccgcagtgagcccgacctctactgtgacccacggggcaccctgcgcaagggcacgctgggcagcaagggccagaagaccacccagaaccgctacagcttttacagcacctgcagtggtcagaaggccataaagaagtgccctgtgcgcccgccctcttgtgcctccaagcaggaccctgtgtatatcccgcccatctcctgcaacaaggacctgtcctttggccactctagggccagctccaagatctgcagtgaggacatcgagtgcagtgggctgaccatccccaaggctgtgcagtacctgagctcccaggatgagaagtaccaggccattggggcctattacatccagcatacctgcttccaggatgaatctgccaagcaacaggtctatcagctgggaggcatctgcaagctggtggacctcctccgcagccccaaccagaacgtccagcaggccgcggcaggggccctgcgcaacctggtgttcaggagcaccaccaacaagctggagacccggaggcagaatgggatccgcgaggcagtcagcctcctgaggagaaccgggaacgccgagatccagaagcagctgactgggctgctctggaacctgtcttccactgacgagctgaaggaggaactcattgccgacgccctgcctgttctggccgaccgcgtcatcattcccttctctggctggtgcgatggcaatagcaacatgtcccgggaagtggtggaccctgaggtcttcttcaatgccacaggctgcttgagaaagagactgggcatgcgggagcttctggctcttgttccgcaaagggccactagtagcagggtgaacctgagctcggccgatgcaggccgccagaccatgcgtaactactcagggctcattgattccctcatggcctatgtccagaactgtgtagcggccagccgctgtgacgacaagtctgtggaaaactgcatgtgtgttctgcacaacctctcctaccgcctggacgccgaggtgcccacccgctaccgccagctggagtataacgcccgcaacgcctacaccgagaagtcctccactggctgcttcagcaacaagagcgacaagatgatgaacaacaactatgactgccccctgcctgaggaagagaccaaccccaagggcagcggctggttgtaccattcagatgccatccgcacctacctgaacctcatgggcaagagcaagaaagatgctaccctggaggcctgtgctggtgccctgcagaacctgacagccagcaaggggctgatgtccagtggcatgagccagttgattgggctgaaggaaaagggcctgccacaaattgcccgcctcctgcaatctggcaactctgatgtggtgcggtccggagcctccctcctgagcaacatgtcccgccaccctctgctgcacagagtgatggggaaccaggtgttcccggaggtgaccaggctcctcaccagccacactggcaataccagcaactccgaagacatcttgtcctcggcctgctacactgtgaggaacctgatggcctcgcagccacaactggccaagcagtacttctccagcagcatgctcaacaacatcatcaacctgtgccgaagcagtgcctcacccaaggccgcagaagctgcccggcttctcctgtctgacatgtggtccagcaaggaactgcagggtgtcctcagacagcaaggtttcgataggaacatgctgggaaccttagctggggccaacagcctcaggaacttcacctcccgattc

SEQ ID NO: 20 - protein, 747 aa, Homo sapiens
MNHSPLKTALAYECFQDQDNSTLALPSDQKMKTGTSGRQRVQEQVMMTVKRQKSKSSQSSTLSHSNRGSMYDGLADNYNYGTTSRSSYYSKFQAGNGSWGYPIYNGTLKREPDNRRFSSYSQMENWSRHYPRGSCNTTGAGSDICFMQKIKASRSEPDLYCDPRGTLRKGTLGSKGQKTTQNRYSFYSTCSGQKAIKKCPVRPPSCASKQDPVYIPPISCNKDLSFGHSRASSKICSEDIECSGLTIPKAVQYLSSQDEKYQAIGAYYIQHTCFQDESAKQQVYQLGGICKLVDLLRSPNQNVQQAAAGALRNLVFRSTTNKLETRRQNGIREAVSLLRRTGNAEIQKQLTGLLWNLSSTDELKEELIADALPVLADRVIIPFSGWCDGNSNMSREVVDPEVFFNATGCLRKRLGMRELLALVPQRATSSRVNLSSADAGRQTMRNYSGLIDSLMAYVQNCVAASRCDDKSVENCMCVLHNLSYRLDAEVPTRYRQLEYNARNAYTEKSSTGCFSNKSDKMMNNNYDCPLPEEETNPKGSGWLYHSDAIRTYLNLMGKSKKDATLEACAGALQNLTASKGLMSSGMSQLIGLKEKGLPQIARLLQSGNSDVVRSGASLLSNMSRHPLLHRVMGNQVFPEVTRLLTSHTGNTSNSEDILSSACYTVRNLMASQPQLAKQYFSSSMLNNIINLCRSSASPKAAEAARLLLSDMWSSKELQGVLRQQGFDRNMLGTLAGANSLRNFTSRF

SEQ ID NO: 21 - DNA, 2385 bp, Mus musculus
  CDS (1)..(2385)
atggccgtccccggctcactggccgagtgtggctacatccggactgtgctgggccagcagatcctgggtcacctggacagctccagcctggccttgccctccgaggccagactgaggctggccggcagcagcggccgcggcgacccggcggcccggagccagcggatccaggagcaggtgcagcagaccctggcccgccggggccggagctctgcggtcagcgggaaccttcaccgaaccagcagtgtccctgagtatgtctacaagctacacgtggttgagaatgactttgttggacggcagtcacctgtcactagggactatgacatgcttaaggctggaatgactgccacttatggaagtcgctgggggagagcagcagcacagtacagttcccagaagtcagtggaggagagatcctggaggcagcctctgaggagacttgagatttccccagatagcagcccggagagagcccactatgggcacagcgaataccagtatgcctggcggagccacgtggtgcctggtgggcgcctcaccctgccacgctatgctcgctcagagatcctgggcctacgccaggctggcacagcccgcaggccacctgggtgcgggtcattcagcgatgctgtcttcgacaatggcccactcaagcccacaatgcccacccaccctcctggcaccagccacagtgcgggcagcttgttggaagagaccactgtgcgcgtgagccaggctcggcttcaaagcacgcagagcagaaccgcccgctcctcctggcccaggagctcagtccgcagtagcctgcgggagccaggaagaatgctgaccaccgcaggccaggctgccgtgggcagcggggatgcacatggggacaggagtgtcttcgctgacgcccagctggggaatgcagacatcgaaatgaccttggagagagctgtgaatatgctggatgcagaccatgtaccagtatccaagatctctgccgcagctaccttcatacagcatgagagcttccaaaaatctgaagcacggaaaagggtcaatcaacttcgaggcatccctaagcttctacaactgctcaaacttcagaacgaagatgttcaacgggctgcttgtggggccttgagaaacttggtatttgaagacaatgataacaagttggaggtagctgaactgaatggagtgcctcggctactgcaggtgctgaagcaaaccagagacttggagacaaaaaagcaaataacaggtttgctctggaacctgtcctctagtgataaactcaagcatctcatgataacagaagccttgctcaccttgacagagagtgtcatcatccccttctccgggtggcctgaaggcgactaccccaaagccaatggcttgcttgattttgatatattctacaatgtcactggatgcctaaggaacatgagctctgctggccccgatgggaggaagatgatgagaaggtgtgatggtctcattgactcattggtccactatgtcagaggaactattgcagactaccagccagatgataaggccacagagaactgtgtgtgcattcttcataacctctcctaccagctggaggcagagctcccagagaaatattcccagagtatctacatgcaaaaccggaatatccagactaacagtaacaaaagtattgggtgttttggcagccgaagtaggaaactaaaagagcaataccaagacttgcagatgccagaggaaaggagcaatccacatggcattgagtggctgtggcattccattgtgataaggatgtatttgtccttaattgccaagagtacccgaaactatacccaagaggcatcacttggggctctccagaacctcacagcaggaggcggcccgatacccacattggtggctcgaatggttgtccaaaaggaaaatggtcttcagcatacacggaagatgctgcacgtgggtgatcccagtgtgaaaaagactgcggtctccctgctgaggaatttgtcacggaatctttccctgcagaatgaaattgctaaagaaactctaccagatttggtttctataattcctgacacagtcccaagtactgaccttctcattgaaaccacagcctctgcttgctatacgttgaacaatttaatgcaaaatagttaccagaatgcacgagaccttctgaacaccggaggtctgcagaaaattatgaccatcagcataggggaaggctatgcccccaacaaggccagcaaagcagcctctgtcctcctttactctctgtgggcacatacagagctgcatcacgcctataagaaggctcagtttaagaaaacagactttgtcaacagccggactgccaaagcctaccactctcttaaagac

SEQ ID NO: 22 - protein, 795 aa, Mus musculus
MAVPGSLAECGYIRTVLGQQILGHLDSSSLALPSEARLRLAGSSGRGDPAARSQRIQEQVQQTLARRGRSSAVSGNLHRTSSVPEYVYKLHVVENDFVGRQSPVTRDYDMLKAGMTATYGSRWGRAAAQYSSQKSVEERSWRQPLRRLEISPDSSPERAHYGHSEYQYAWRSHVVPGGRLTLPRYARSEILGLRQAGTARRPPGCGSFSDAVFDNGPLKPTMPTHPPGTSHSAGSLLEETTVRVSQARLQSTQSRTARSSWPRSSVRSSLREPGRMLTTAGQAAVGSGDAHGDRSVFADAQLGNADIEMTLERAVNMLDADHVPVSKISAAATFIQHESFQKSEARKRVNQLRGIPKLLQLLKLQNEDVQRAACGALRNLVFEDNDNKLEVAELNGVPRLLQVLKQTRDLETKKQITGLLWNLSSSDKLKHLMITEALLTLTESVIIPFSGWPEGDYPKANGLLDFDIFYNVTGCLRNMSSAGPDGRKMMRRCDGLIDSLVHYVRGTIADYQPDDKATENCVCILHNLSYQLEAELPEKYSQSIYMQNRNIQTNSNKSIGCFGSRSRKLKEQYQDLQMPEERSNPHGIEWLWHSIVIRMYLSLIAKSTRNYTQEASLGALQNLTAGGGPIPTLVARMVVQKENGLQHTRKMLHVGDPSVKKTAVSLLRNLSRNLSLQNEIAKETLPDLVSIIPDTVPSTDLLIETTASACYTLNNLMQNSYQNARDLLNTGGLQKIMTISIGEGYAPNKASKAASVLLYSLWAHTELHHAYKKAQFKKTDFVNSRTAKAYHSLKD

SEQ ID NO: 23 - DNA, 2184 bp, Mus musculus
  CDS (1)..(2184)
atgaaccactctccgctcaagaccgcgctggcgtacgaatgcttccaggaccaggacaactccacgctggctttgccctctgaccaaaagatgaagaccggcacgtcgggcaggcagcgcgtgcaggagcaagtgatgatgaccgtcaaacggcagaagtccaagtcttcccagtcgtccaccttgagtcactccaaccgaggttccatgtatgatgggctggctgacaattacaacaactacggcaccacgagcagaagcagctacttctccaagttccaggcagggaatggctcgtggggatatccgatctacaatgggaccctcaagcgggagcccgacaacagacgcttcagctcctatagccagatggagaactggagccggcactatccccgaggcagctgtgccaccccgggcgctggcagtgacatctgcttcatgcagaaaatcaaggcaagccgcagtgagcctgacctctactgtgacccaaggggcacactgcgcaagggcaccctgggcagcaagggccacaagaccacccagaaccgatgcagcttctacagcacttgcagtggtcagaaggctgtcaagaagtgtcccgtgcggccgccctcctgcacctccaagcaagacccggtgtatgtgccgcctatctcctgcaacaaggacctgtccttcggccactcgagggccagttccaagatctgcagtgaggacattgagtgtagtgggctgaccatccccaaggctgtgcagtacctgtgctcccaggatgagaagtaccaggccatcggagcctattacatccagcacacctgcttccaggatgaatctgccaagcaacaggtctatcagctggggggcatctgcaagctggtggacctcctccgcagccccaatcagaatgtccagcaggctgctgccggggccctgcgcaacctggtgttcaggagcacccccaacaagctggagaccaggaggcagaacggaatccgtgaagctgtcagcctcctgaggagaagcgggagcacggagatccaaaaacagctgactgggctcctctggaacctgtcttccactgatgagctgaaggaggagctggtggccgacgccctgcctgttctgactgaccgggtcatcattcctttctctggctggtgtgatggtaacagcaacatgtcccgggaagtagtggaccctgaggtcttcttcaatgctacaggctgcttgaggaacctgagttcagctgatgctggccgccagactatgcggaactactctgggctcattgactccctcatggcctatgtccagaactgcgtggctgccagccgctgcgatgacaagtctgtggagaactgcatgtgtatcctgcataacctctcctaccgcctggacgccgaggtgcccacccgctaccgccagctggagtacaatacccgcaatgcctacaccgagaagtcctccactggctgcttcagcaacaggggtgacaagatgatgaacaataactatgactgcccacttccggaggaagagaccaaccccaagggcagcagctggctgtaccactcagatgccatccggacctacctgaacctcatgggaaagagcaagaaagatgctaccttggaggcctgtgctggggccctgcaaaacctgacagccagcaaggggctgatgtccaatggtatgagtcagttaattggaataaaggaaaagggcctgccacaaatcgcccgtctcctgcaatctggcaattcggatgtggtgcggtccggagcctctctgctgagcaacatgtctcgccaccctgtgctgcacagagtgatgggaaaccaggtgttcccagaggtaaccagactcctcactagccacaccggcaataccagcaactctgaagatatcttgtcctcagcctgctacactgtgaggaacctgatgacctcacagcctcagatggccaagcagtacttctccaacagcatgctcaacaatgtcttcaacttgtgccgcaacactgcctcctcacctaaggctgcagaggctgcccggctactcctgtctgacatgtgggccagcaaggagctgcagagtgtcctcaggcagcaaggtttcgataggaatatgatgggaaacatagctggggccaacaacctcagaaacttcacctcccggttc

SEQ ID NO: 24 - protein, 728 aa, Mus musculus
MNHSPLKTALAYECFQDQDNSTLALPSDQKMKTGTSGRQRVQEQVMMTVKRQKSKSSQSSTLSHSNRGSMYDGLADNYNNYGTTSRSSYFSKFQAGNGSWGYPIYNGTLKREPDNRRFSSYSQMENWSRHYPRGSCATPGAGSDICFMQKIKASRSEPDLYCDPRGTLRKGTLGSKGHKTTQNRCSFYSTCSGQKAVKKCPVRPPSCTSKQDPVYVPPISCNKDLSFGHSRASSKICSEDIECSGLTIPKAVQYLCSQDEKYQAIGAYYIQHTCFQDESAKQQVYQLGGICKLVDLLRSPNQNVQQAAAGALRNLVFRSTPNKLETRRQNGIREAVSLLRRSGSTEIQKQLTGLLWNLSSTDELKEELVADALPVLTDRVIIPFSGWCDGNSNMSREVVDPEVFFNATGCLRNLSSADAGRQTMRNYSGLIDSLMAYVQNCVAASRCDDKSVENCMCILHNLSYRLDAEVPTRYRQLEYNTRNAYTEKSSTGCFSNRGDKMMNNNYDCPLPEEETNPKGSSWLYHSDAIRTYLNLMGKSKKDATLEACAGALQNLTASKGLMSNGMSQLIGIKEKGLPQIARLLQSGNSDVVRSGASLLSNMSRHPVLHRVMGNQVFPEVTRLLTSHTGNTSNSEDILSSACYTVRNLMTSQPQMAKQYFSNSMLNNVFNLCRNTASSPKAAEAARLLLSDMWASKELQSVLRQQGFDRNMMGNIAGANNLRNFTSRF

SEQ ID NO: 25 - DNA, 753 bp, Bos taurus
  CDS (1)..(753)
ctggagtacaacgcccgcaacgcctacaccgacaagtcctccaccggctgcttcagcaacaagagcgaccgcatgacgaacaacaactatgattgcccgcttcccgaggaagagcccaaccccaagggcagcagctggctgtaccactcggacgccgtccgcacctacctgaacctcatgggcaagagcaagaaggacgccaccctggaggcctgcgcgggcgccctgcagaacctgaccgccagcaaggggctgatgtccagtggcatgagccagctgatcgggctgaaggagaagggcctgccccacatcgcccgcctcctgcaatctggcaactcggacgtggtgcggtccggagcctcgctcctgagcaacatgtcccgccaccccgcgctgcacagggtgatggggacccaagtgttcccagaggtgaccagactcctcaccagtcacactggcaacaccagcaactcggaggacatcctggcctcggcctgctacactgtgaggaacctgatggcctccctgccgggcatggccaagcagcacttctccagcagcatggtcaacaacatcatcaacctgtgccgcagcagcacctcccccaaggctgcggaggccgcccgcctcctcctgtccgacatgtggtccagcagggagctgcaggggctgctcaggcagcaaggtttcgataggagcatgctggggaccttagccggggccaacagcctcaggaacttcacctcccgattc

SEQ ID NO: 26 - protein, 251 aa, Bos taurus
LEYNARNAYTDKSSTGCFSNKSDRMTNNNYDCPLPEEEPNPKGSSWLYHSDAVRTYLNLMGKSKKDATLEACAGALQNLTASKGLMSSGMSQLIGLKEKGLPHIARLLQSGNSDVVRSGASLLSNMSRHPALHRVMGTQVFPEVTRLLTSHTGNTSNSEDILASACYTVRNLMASLPGMAKQHFSSSMVNNIINLCRSSTSPKAAEAARLLLSDMWSSRELQGLLRQQGFDRSMLGTLAGANSLRNFTSRF

SEQ ID NO: 27 - DNA, 2184 bp, Canis familiaris
  CDS (1)..(2184)
atgaacccctcgccgctcaagaccgccctggcctacgagtgcttccccgaccaggacaactccacgctggccctgccgtcggaccagaagatgaagacgggcacgtcgggccgccagcgcgtgcaggagcaggtgatgatgaccgtcaagcggcagaagtccaagtcctcgcagtcgtccaccctgagccactccaaccgaggttccatgtacgatggcctggccgacaattacaacaactatgggaccaccagccggagcagctactactccaagatgcaggcggcgaatggctcatggggatatccgatctacaacgggaccctcaagcgggagaatgacaacaggcgcttcagctcctacagccagatggagaactggggccggcactacccacggggcacctgtaccaccactggcgccggcagcgacatctgcttcatgcagaagatcaaggcgagccgcagcgagccggacctctactgtgaccctcgcggcaccctgcgcaagggcacgctgggcaaccggggccagaagaccacccagaaccgctacagcttctacagcacctgcagcggccagaaggcggtcaagaagtgtcccgtgcgcccgtcctcctgcacctccaagccggaccccgtgtacgtcccacccatctcctgcaacaaggacctgtcctttggccactcgagggccagctccaagatctgcagtgaggatattgagtgcagtgggctgaccatccccaaggctgtgcagtacctgagctcccaggacgagaagtaccaggccatcggggcctattacatccagcacacctgtttccaggacgaatcggccaaacaacaggtgtatcagctgggaggcatctgcaagctggtggacctcctccggagccccaaccagaacgtgcagcaggctgcggctggggccctgcgtaacctggtgttccggagtgtcacgaacaagctggagacccggaggcagagcgggatccgagaggctgtcagcctcctgaggagaaccgggagcactgagatccagaaacaactgaccgggctgctctggaacctgtcgtccactgacgagctgaaggaggagctcatcgccgacgccctgcctgtgctggccgaccgggtcatcatccccttctccggctggtgtgacggcaacagcaacgtgacccgggaaatggtggaccccgaagtcttcttcaatgccaccggctgcttgaggaacctgagctcggccgatgccggccgccagaccatgcggaactacacggggctcattgactccctcatggcctacgtccagaactgcgtggccgccagccgctgtgatgacaagtccgtggagaactgcatgtgcatcctgcacaacctctcctaccgcctggacgcggaggtgcccacgcgctaccgccagctggagtacaacgcgcgcaacgcctacacggagaagtcctccaccggctgcttcagcaacaagagcgataagatgatgaacaacaactacgactgccccctcccggaggaagaggccaaccccaagggcagcagctggctgtaccattcggatgccatccgcacctacctgaacctcatgggcaagagcaagaaagacgccaccttggaggcctgcgccggcgccctgcagaacctgacggccagcaaggggctgatgtccagtggcatgagccagctgatcgggctcaaggagaaaggcctgccccagatcgctcgcctcctgcaatcaggcaactctgatgtggtgcggtctggagcctccctcctgagcaacatgtcccgccaccccgtgctgcacagagcgatggggaaccaggtattccccgaggtgaccaggctcctcaccagtcacactgggaacaccagcaactcggaagacatcctgtcctcggcctgctacacggtgaggaacctgatggcctcccagccgcagatggccaagcagtacttcaccagcagcatggtcaacaacatcatcaacctgtgccgcagcagtgcctcacccaaggctgcggaagctgcccgcctcctcctgtctgacatgtggtccagcaaggaactgcagggtgtcctcagacagcaaggcctggataggaacatgctgggggccttaaccggacccaacagcctcaggaacttcacctcccgattctaa

SEQ ID NO: 28 - protein, 727 aa, Canis familiaris
MNPSPLKTALAYECFPDQDNSTLALPSDQKMKTGTSGRQRVQEQVMMTVKRQKSKSSQSSTLSHSNRGSMYDGLADNYNNYGTTSRSSYYSKMQAANGSWGYPIYNGTLKRENDNRRFSSYSQMENWGRHYPRGTCTTTGAGSDICFMQKIKASRSEPDLYCDPRGTLRKGTLGNRGQKTTQNRYSFYSTCSGQKAVKKCPVRPSSCTSKPDPVYVPPISCNKDLSFGHSRASSKICSEDIECSGLTIPKAVQYLSSQDEKYQAIGAYYIQHTCFQDESAKQQVYQLGGICKLVDLLRSPNQNVQQAAAGALRNLVFRSVTNKLETRRQSGIREAVSLLRRTGSTEIQKQLTGLLWNLSSTDELKEELIADALPVLADRVIIPFSGWCDGNSNVTREMVDPEVFFNATGCLRNLSSADAGRQTMRNYTGLIDSLMAYVQNCVAASRCDDKSVENCMCILHNLSYRLDAEVPTRYRQLEYNARNAYTEKSSTGCFSNKSDKMMNNNYDCPLPEEEANPKGSSWLYHSDAIRTYLNLMGKSKKDATLEACAGALQNLTASKGLMSSGMSQLIGLKEKGLPQIARLLQSGNSDVVRSGASLLSNMSRHPVLHRAMGNQVFPEVTRLLTSHTGNTSNSEDILSSACYTVRNLMASQPQMAKQYFTSSMVNNIINLCRSSASPKAAEAARLLLSDMWSSKELQGVLRQQGLDRNMLGALTGPNSLRNFTSRF

SEQ ID NO: 29 - DNA, 813 bp, Danio rerio
  CDS (1)..(813)
atggcctcttccaacaatacctcacccgaaggaggctctccgccccaccagaaccgcattcgccagtcgttggagaactgcgtttgcattttgcacaacctgacctatcagctggagaccgagatgccgactctcttcaacaaaataaacgctctggccagtcagtctcacaaccgctccagttcctctgacgctggtcctatcatctgcttcaggttacagagccagaaactcaagcagaggggttttgactatcctgtgatggaggataacaaccctgaaggtgtgggctggctcttccactctaaagcgctgcagttttacctcaatctgctgagttccagtgaacgggacgccacactggaggcctgttgtggaaccctgcagaacctcacagccaatgaaggcatagttgttgtgcgtctgactgtatgttgtgtgtgtgttttgctctataaagcacctcagtctctgccgcagctggtgggtttcctgaactctggtctttccaagaaagaatcttctcctgaatatgacagtgcgatggccaccgctctgcgcagcgcaaacactctgattaatgcggatcctgatactggcaagaacctgctgaacaacagcctgatcaacaacctctacaacatgagtctcaatagggatcttcaaaagtccagcaaagcgtcagcacttcttcttcacaatctgtggtcgaataagaatatccaaagctttcttaaaaagaacggcatgaaaaagaagtcctttgtgaatgaagtgacgtcagcagctctgaaatctcatctggttattgac

SEQ ID NO: 30 - protein, 271 aa, Danio rerio
MASSNNTSPEGGSPPHQNRIRQSLENCVCILHNLTYQLETEMPTLFNKINALASQSHNRSSSSDAGPIICFRLQSQKLKQRGFDYPVMEDNNPEGVGWLFHSKALQFYLNLLSSSERDATLEACCGTLQNLTANEGIVVVRLTVCCVCVLLYKAPQSLPQLVGFLNSGLSKKESSPEYDSAMATALRSANTLINADPDTGKNLLNNSLINNLYNMSLNRDLQKSSKASALLLHNLWSNKNIQSFLKKNGMKKKSFVNEVTSAALKSHLVID

SEQ ID NO: 31 - DNA, 2184 bp, Rattus norvegicus
  CDS (1)..(2184)
atgaaccactcgccgctcaagaccgcgctggcctacgaatgcttccaggaccaggacaactccacgctcgctttgccctctgaccagaagatgaagaccggcacgtcgggcaggcagcgtgtgcaggagcaggtgatgatgacggtcaaacggcagaagtccaagtcttcgcagtcgtccaccttgagtcactccaaccgaggttccatgtacgatgggctggttgacaattacaacaactatggcaccacgagcagaagcagctacttctccaagttccaagcagggaatggctcctggggatatccgatctataatgggaccctcaagcgggagcctgacaacagacgcttcagctcctatagccagatggagaactggagccggcactatccccgagggagctgtgccaccacaggcgctggcagtgacatctgcttcatgcagaaaatcaaggcaagccgcagcgagcctgacctctactgtgacccgaggggcacactgcgcaagggcacactgggcggcaagggccaaaagaccacccagaaccgatacagcttttacagcacttgcagcggtcagaaggctgtcaagaagtgtcccgtgaggccgccctcctgcacctccaagcaagacccagtgtgcatgccgcctatctcctgcaacaaggacatgtcctttggccactcaagggccagttccaagatctgcagtgaggacattgagtgtagcgggctgaccatccccaaggctgtgcagtacctgtgctcccaggacgagaagtaccaggccatcggagcctattacatccagcacacctgcttccaggatgaatctgccaagcaacaggtctatcagctggggggcatctgcaagctggtggacctcctccgcagccccaatcagaatgtccagcaggctgctgccggggctctgcgcaatctggtgttcaggagcaccactaacaagctggagaccaggaggcagaatgggatccgtgaggctgtcagcctcctgaggagaagcgggagcacggagatccagaaacagttgactgggctgctctggaacctgtcttccactgacgagctaaaggaggaactggtggccgatgccctgcctgttctgactgaccgggtcatcatccctttctctggctggtgtgatggtaacagcaacatgtcccgggaagtagtggaccccgaggtcttcttcaatgccacaggctgcctgaggaatctgagttcagctgatgctggccgccagactatgcggaactactctgggctcattgactccctcatggcctatgtccagaactgtgtggctgccagccgctgcgatgacaagtctgtggagaactgcatgtgtatcctgcataacctctcataccgcctggacgccgaggtgcccacccgctaccggcagctggagtacaacacccgcaatgcctacaccgagaagtcctccactggctgcttcagcaacaggggtgacaagatgatgaacaacaactatgactgcccactccctgaggaagagaccaaccccaagggcagcagctggctgtaccactcagatgccatccgcacctacctgaacctcatgggcaagagcaagaaagacgctaccttggaggcctgtgccggggccctgcagaacctgaccgccagcaagggcctgatgtcgaatggtatgagtcagttgattggaataaaggaaaagggcttgccacaaatagcccgtctcctgcaatctggcaattcggatgtggtgcggtctggggcctctctgctgagcaacatgtctcgccaccctgtgctgcacagagtgatggggaatcaggtgttcccagaggtaaccagactcctcactagccacaccggcaataccagcaactctgaagatatcctgtcctctgcctgctacactgtgaggaacctgatgacctcgcagcctcagatggccaagcagtacttctccaacagcatgctcaacaatgtcttcaacttgtgccgcaacagtgcctcctcacctaaggctgccgaggctgcccggctactcctgtctgacatgtgggccagcaaggagctgcagagtgtcctcaggcagcaaggtttcgataggaacatgatgggaaacatagctggggccaacaacttcagaaacttcacctcccggttc

SEQ ID NO: 32 - protein, 728 aa, Rattus norvegicus
MNHSPLKTALAYECFQDQDNSTLALPSDQKMKTGTSGRQRVQEQVMMTVKRQKSKSSQSSTLSHSNRGSMYDGLVDNYNNYGTTSRSSYFSKFQAGNGSWGYPIYNGTLKREPDNRRFSSYSQMENWSRHYPRGSCATTGAGSDICFMQKIKASRSEPDLYCDPRGTLRKGTLGGKGQKTTQNRYSFYSTCSGQKAVKKCPVRPPSCTSKQDPVCMPPISCNKDMSFGHSRASSKICSEDIECSGLTIPKAVQYLCSQDEKYQAIGAYYIQHTCFQDESAKQQVYQLGGICKLVDLLRSPNQNVQQAAAGALRNLVFRSTTNKLETRRQNGIREAVSLLRRSGSTEIQKQLTGLLWNLSSTDELKEELVADALPVLTDRVIIPFSGWCDGNSNMSREVVDPEVFFNATGCLRNLSSADAGRQTMRNYSGLIDSLMAYVQNCVAASRCDDKSVENCMCILHNLSYRLDAEVPTRYRQLEYNTRNAYTEKSSTGCFSNRGDKMMNNNYDCPLPEEETNPKGSSWLYHSDAIRTYLNLMGKSKKDATLEACAGALQNLTASKGLMSNGMSQLIGIKEKGLPQIARLLQSGNSDVVRSGASLLSNMSRHPVLHRVMGNQVFPEVTRLLTSHTGNTSNSEDILSSACYTVRNLMTSQPQMAKQYFSNSMLNNVFNLCRNSASSPKAAEAARLLLSDMWASKELQSVLRQQGFDRNMMGNIAGANNFRNFTSRF

SEQ ID NO: 33 - DNA, 450 bp, Pan troglodytes
  CDS (1)..(450)
atgcgtaactactcagggctcattgattccctcatggcctatgtccagaactgtgtagcggccagccgctgtgacgacaagtctgtggaaaactgcatgtgtgttctgcacaacctctcctaccgcctggacgccgaggtgcccacccgctaccgccagctggagtataacgcccgcaacgcctacaccgagaagtcctccaccggctgcttcagcaacaagagcgacaagatgatgaacaacaactatgactgccccctgcctgaggaagagaccaaccccaagggcagcggctggttgtaccattcagatgccatccgcacctacctgaacctcatgggcaagaggcagtgttgctgtctgcgtgtccaccttggaatctggctgaactggctgggaggaccaagactgcggctggggtgggcagggaagggaagccgggggctgctg

SEQ ID NO: 34 - protein, 150 aa, Pan troglodytes
MRNYSGLIDSLMAYVQNCVAASRCDDKSVENCMCVLHNLSYRLDAEVPTRYRQLEYNARNAYTEKSSTGCFSNKSDKMMNNNYDCPLPEEETNPKGSGWLYHSDAIRTYLNLMGKRQCCCLRVHLGIWLNWLGGPRLRLGWAGKGSRGLL

SEQ ID NO: 35 - DNA, 5154 bp, Gallus gallus
  CDS (1)..(5154)
atggtcttccagctggggctggtgttgctggtgcaggtttggctggtgcaggggcagttggacctccatatgggaaggatggtcttccagctggggctggtgttgctggtgcaggtttggctggtgcaggggcagttgggtctccatatgggaaggatggtcttccagctggggctggtgttggtggtgcagggagtaaagaagtcatgggatctgtccatggtcaggatgctctgcttggcagagctcaaggatatacatgacttaacaggaacctggtttaaggatgggttaaagttaacaagcatggacggagtctctttggagaaggaaggtctggtccacaaactcgttattagcaaagtagaagatatccatgctgggaagtataggtttgaagctggagatataaaaactgaagcttcaatttttgttgaagacaagccacagccacctgcaggacccatgaaaattgtagaaagctctgcaaatgatgttaccattcagtggaatcccccaaaggatgatgggggcaaaccagtgcaaaactatattattgagaaacagcaagtaggcaagagcgactgggtggctgtgggagaaacccccaggagctgtactactttcactaccagcaaagtggaacaagacatgagctactacttcagagtgagagctgtgaatgcagagggaaccagcgatgcattggaatcagatgaggtggtgactatcagtaaagatcctcccgagatcattggtgtcagcaaagacaccatcacaatatcctggaaaacacctcggagagctggcagctcccgaatttcgggatacatcgttcagaaacgcaagatgggcagcatgacctgggtgccagtcaacagtgtgcccgtagcagacaagaagctgaaaataactgatctcaagaagggtctgcagtatgagttttgtgtggcagctgtcaatgcttctggcataggagatatgagtgcaccgtcacaatctgtctttgctcgggactccacaacaaaagagggaagtgccgtggaaggctacaacgtggagatgcggtcttctaacaacctcagctggaccaaatgcaacatttttcctatagagacgaccacttacaaagttaaaggcctgcaaaccaaggggacgtacttcctacgtgatggggttcctcttccaagccgtgctaaaataagcacccaagatgatacctcccagctgctgattaaagcagctcagttcactgacagtggcatctatactgttgagctcacgagtgggacagggaaaagagaaacgttcagcttccaagttcaagttacagatatcccacaaccacccggacctattgaactgagagagaatgtgccaaatatagtgacagtaacctgggagccatcaacatctgagaaatgggaaagtaatctcttctacacagtcctgaaacgtgaatcacggaaaggcttgtggcacgtgatcggtgacctgatctacaccaacaaattcacttacaccaaagtgatcccaggcagggattactacttcagggttgtggcaaaaaatcacttgggatccagttgtccatccgacactgtgcagccttggagaattcgaaaaccaaaggctgacattcaagtcagaccacagaggtacaagggggttaatcagaaccagcccccaagattcctcgtccccctgaagcctcacgtggtgaccactggcagtgagtgccgcatgagctgtgcagttggaggccatccacccccaaaagtcacgtggtacaaagatgggaaagacctctccaataatccttcctattttggcacaaacgactttggtgtctgctccctggtgatccttggcgtttccaaggctgatgaaggagactacacagttgaagccaccaatgagtcaggccgtgctttcagcagagcctccctcactattaaagcacagctctctgctggcagcagcagccagcaccgatcctcagccgtggtgtggcacatcgtggcctttgtcctcacccactgcacgaaacgcaaagggtttcacaaccgcgtggagccaagagcatcctcgcgccatcgacgcgctcgctccctgcctaaattgggccctgtcatctctgctccttccccggtgggaacaagctctcccttccccgcagcatttcggagctggggcagctcgctgtgtgcagggggaggtgaggaggagtgcggggatctgcctacagagaatgggagagaggcagcaggagatgggcagcacctcaaccagtctggtggaggctccttgggggcagcaaaagccacaacccgggagcctgagcccatggggatacagctggcagtgggggctgcgagtggagcccaggatgcaggagggaaggaaaacagcgcagtgccgcgtgtggaaggagcgccttccgatcccccgggagggaaggaccttccacgaggggccgagcaacgccgaggctgtgcgcacgaggagggcaggttttcctcggggagaaacctcgggaagtgtcagctgagccacggctcagaaaatgccattatcgtgggagatgcaccgcatccccggctcagctccgtctgtcccccccccctcccccgccgagcaccgccgggcagcagcacgccgaggtgccgcggtggcacagcagagccgccatcagccacggcggggacggctgcgctcccccggcggatttcgcagccgtctgcagacaccttcagctcaggagcgcctgacaagtttgaacagaaagccccgcaccgctccgggagcagcattgggccagcgagccctttgattgcgatcaggcagctggcaggaatcccagagctgggggtgagggcagcagagctgcctgccctgcagggccgcgagcggcggcggcggggagcgccgttggcatatgagtgcttccaagaccaggccagctccacgctggccctgccctcggatcacaagctgaaaaccaagggcacgggaaagcagcgggtccaggagcaggtgatgatgacggtgaagcggcagaagcagaagtcgtcggtgtcgtcgagcgtggggcactccaaccgaggttccatgtacgactgtgtagctgatggttatggctacgggacgtcccggggcagttattacaccaaaacccaaatgggaaacagcagctggggatatccgctgtacaacgggaccctgaagcgggatgcggagaaccggcgctacagctcctacagccagatggagggctggggcagcaagcactacagcaaggcagtctgcagccccaacagggccggcagtgactactgctttgtgcagaacatcaagagcagccggagcgagcccgacctctactgcgaaccaccgcggggcacactgaggaagagtcaggttgggggtcgggcagagcacaaggcgaccttgaaccgccagagcatctacagcagctgcagcacccagcagggaactaccaggacaagtaaaaaaataccagcacgggccctctcctgcccctccagcaacaagcccgatgtggtctatgcccagcccgtgatgagctgcaagcaggatgcggtttatggacaggctcagtctggctccaagttagagaaggaggtctgcatcttcaggggctgctgcatcactgtccggcagctctacgcaggacttatcccacctcccataatatgtggtgacgagatagatggtggcacgatgaccatccagaaagccatacagctcctgtgctcctctgatgacaaataccaggccatgggggcttattacctccagcacacctgcttccaggatgagtctgccaagcaagaggtctatcggctgggggggattgccaagctcgttgagctgctccgcagcacaaaccagaacgtacagcgggcggcagccggagccctccggaatttggtcttcaggaatccaaccaacaagatagaaacccggcggcagaacgggataagggagtgtgtgagcctcctgaggaggacggggaacaccgaaattcagaagcagctgacaggtctgctctggaacctctcctccactgatgaattaaaggaggagttgatacaggaggccctccccgtcttgacagactgcgttatcatccctttctctggctggtctgatggtggctgcaacaggacaagggaaatcatcgaccccgaagtattcttcaatgctacagggtgcttgagaaacctcagttctgcagacatgggacgtcagaccatgcgaaactaccctggcttgatcgattccgtcatgacctatgcccagaactgcgtggcttctaaccgacctgatgacaagtctgtggagaactgcatctgcatcctgcacaacctctcctaccgcctggatgctgaggttcccaacaaatacacccaactcaaccacatggcccggagcgtttacatggacaaaactctcacaggctgcttcaacagcaggagtggcaaaatggagaatgatgagtatggcgtccctctccctgaggaggattttaagcccaagggacccagctggctgtaccactcggatgccatccgcacctacctgtccctgatggatcacagcaagaaggatgccaccctggaggcttgtgctggggccctgcagaacctcactgcgagccgagggctgatgtccaatgccatgagccaactgattggggtgaaggaaaaaggtttgcctcgcattgcacggctcctgcagtccaacagctccgaagttgtccggtccggtgcttctttgctgagcaacatgtcccgacatcctatcctgcacaaaaccatggctcaccaggtgctcccagatgtatcacgtctcctgtcattccagtctggaaataccaacagctatggcgagatcatgacatcagcttgttacactctgaggaacctcatcatgtccaacccacacctggggaagtgttacttgacaagcaacatgctcaataatgtagtgagcctgtgccgaaatggctcctgtccaaaagcagccgaagctgctcgcctcctcctgacagacctttggtcgaacagggagctccagagtgtgctcaagcaggagctggtgaagctgtgcacgggtgctgccgactga

SEQ ID NO: 36 - protein, 1717 aa, Gallus gallus
MVFQLGLVLLVQVWLVQGQLDLHMGRMVFQLGLVLLVQVWLVQGQLGLHMGRMVFQLGLVLVVQGVKKSWDLSMVRMLCLAELKDIHDLTGTWFKDGLKLTSMDGVSLEKEGLVHKLVISKVEDIHAGKYRFEAGDIKTEASIFVEDKPQPPAGPMKIVESSANDVTIQWNPPKDDGGKPVQNYIIEKQQVGKSDWVAVGETPRSCTTFTTSKVEQDMSYYFRVRAVNAEGTSDALESDEVVTISKDPPEIIGVSKDTITISWKTPRRAGSSRISGYIVQKRKMGSMTWVPVNSVPVADKKLKITDLKKGLQYEFCVAAVNASGIGDMSAPSQSVFARDSTTKEGSAVEGYNVEMRSSNNLSWTKCNIFPIETTTYKVKGLQTKGTYFLRDGVPLPSRAKISTQDDTSQLLIKAAQFTDSGIYTVELTSGTGKRETFSFQVQVTDIPQPPGPIELRENVPNIVTVTWEPSTSEKWESNLFYTVLKRESRKGLWHVIGDLIYTNKFTYTKVIPGRDYYFRVVAKNHLGSSCPSDTVQPWRIRKPKADIQVRPQRYKGVNQNQPPRFLVPLKPHVVTTGSECRMSCAVGGHPPPKVTWYKDGKDLSNNPSYFGTNDFGVCSLVILGVSKADEGDYTVEATNESGRAFSRASLTIKAQLSAGSSSQHRSSAVVWHIVAFVLTHCTKRKGFHNRVEPRASSRHRRARSLPKLGPVISAPSPVGTSSPFPAAFRSWGSSLCAGGGEEECGDLPTENGREAAGDGQHLNQSGGGSLGAAKATTREPEPMGIQLAVGAASGAQDAGGKENSAVPRVEGAPSDPPGGKDLPRGAEQRRGCAHEEGRFSSGRNLGKCQLSHGSENAIIVGDAPHPRLSSVCPPPLPRRAPPGSSTPRCRGGTAEPPSATAGTAALPRRISQPSADTFSSGAPDKFEQKAPHRSGSSIGPASPLIAIRQLAGIPELGVRAAELPALQGRERRRRGAPLAYECFQDQASSTLALPSDHKLKTKGTGKQRVQEQVMMTVKRQKQKSSVSSSVGHSNRGSMYDCVADGYGYGTSRGSYYTKTQMGNSSWGYPLYNGTLKRDAENRRYSSYSQMEGWGSKHYSKAVCSPNRAGSDYCFVQNIKSSRSEPDLYCEPPRGTLRKSQVGGRAEHKATLNRQSIYSSCSTQQGTTRTSKKIPARALSCPSSNKPDVVYAQPVMSCKQDAVYGQAQSGSKLEKEVCIFRGCCITVRQLYAGLIPPPIICGDEIDGGTMTIQKAIQLLCSSDDKYQAMGAYYLQHTCFQDESAKQEVYRLGGIAKLVELLRSTNQNVQRAAAGALRNLVFRNPTNKIETRRQNGIRECVSLLRRTGNTEIQKQLTGLLWNLSSTDELKEELIQEALPVLTDCVIIPFSGWSDGGCNRTREIIDPEVFFNATGCLRNLSSADMGRQTMRNYPGLIDSVMTYAQNCVASNRPDDKSVENCICILHNLSYRLDAEVPNKYTQLNHMARSVYMDKTLTGCFNSRSGKMENDEYGVPLPEEDFKPKGPSWLYHSDAIRTYLSLMDHSKKDATLEACAGALQNLTASRGLMSNAMSQLIGVKEKGLPRIARLLQSNSSEVVRSGASLLSNMSRHPILHKTMAHQVLPDVSRLLSFQSGNTNSYGEIMTSACYTLRNLIMSNPHLGKCYLTSNMLNNVVSLCRNGSCPKAAEAARLLLTDLWSNRELQSVLKQELVKLCTGAAD

SEQ ID NO: 37 - DNA, 3795 bp, Xenopus laevis
  CDS (1)..(3795)
gatgtgacgcggaaagccccagagcccggcgctggctctgttttctggggagagggcggcagggtttgggcaccgcaccatggagaccgggtgaggggcagcacgtctgggagttacactgcgccttgggaacgggaccgtgcagtccctcatgaggcggacggacccgcggggaggcttgagccggcaggtggaatgccagttccggggcagacttccctgatggaggaggcactgcagaagatcacgcaggcagcacccagcaatactggcatggagcctgaaaccactgcaactaacattttggcatctgtaaaagaacaggagctgcagtttgaaaggctcaccagagaacttgaggtggaaagacagatcgttgccaatcagctagaaagatgccgactcggggccgagtcaccgagtatcgccagtgtaagttctactgaaaagtcatttccctggagatcgggagatgtgccagccggaggtccctccaaaccgagattgtcggattccagtcaccctaaccacttcttgataagatcagagccggaaccgatggcagtgtactctcctgagcaaagctctctccatgaaagtgaggggtcgatgggtaactccaggagctcaactcaaatgaattcatactctgacagcggctaccaagaggcaggcagctttcataacaacaacatagggaaggccgaactgcgagcccagctgtcgtttacggggtccacaggcaaccatgttgtacggaattccagggctgaaggccagactttagtccaaccgccaccaccaaatacaatggcaggcagccgagctgtgcggagggtcagctctgtcccatcaaggtcgcagtcaccttcttatgtcattggatctggagtttccccttctagagggtcactgagaacttctgtcggaagtggatatggttctccaacaatttccgatccacggccacttgccacttcaaacacatactcttctactacattgccttctcagagagctgcttctccgtatacatcacacagggccaactcaccgacagtcacactcaggattggttcacttaacagcagacagctggccaatcctaatacaatgacttcatcttaccagacactgggaagttctgcccgagttggttcaccgttgactttatctgatgcacatagtagagttggctcatcttcccaagctcctatgggatcctcttcctctccaaagcgggctggtatgactgcagtcccccagcacatgggaacattacaaagaaacttgcatgatattgaccagtacggacagcaacattatgacatctatgaaaggatggttccatcaagaccagatagccttacaggcttaagaagttcttatgcaagtcaacacagtcaacttggacaggaactgagatcaacagtatcacccgacctgcagatcacgccaatatatgaagggaggacttattatagtccagtctaccgcaacgccaaccatgcggccatagagctcaggcaaggctcacatacagcaatctatcgtacaggatcagggtctggtaacctacagaggaccatgagcaatcgtagcacacttgcataccaaagaaataattatgcgctcaacacagcggctaattatgcagagccatacagatcaatgcagtatcgaatatcagaatccggctacaacaggatgccgcatacagcacccccagacgatggcaccacaaggtctccttccattgacagcatccagaaggacccaagggagtttgcttggcgggacccggagttaccagaagtcatttatatgcttcagcatcactttccttcggtgcaagccaatgccgctgcttacctgcagcacctctgctttggagaccacaaaaccaagatagaggtgtgccggctgggagggatcaaacacttggtagaccttcttgataacaaggtactggaagtccagaagaatgcctgtggagccttgagaaatttagtttatggcaaatctactgatgaaaataagattgccgtgaaaaatgcggggggcgttcctgcccttttaagactactgagaaaaacaaatgaccaagaagtacgggaacttgtcactggagtcctgtggaacttatcttcctgtgatgctgtaaagatgactattatccgtgacgctttatctcccctcactaacactgtgatagtgccacattcgggcttcaataattcttctttcgacgacgatcacaaaatgaaatttcagtcttcatcagtcctgcgcaacactaccggctgcatgagaaacctgagttcggcaggggaagaggcacgcaagcagatgagatactgtgaagggctggtcgattctctgctcttcgtgatccaaacctgtgtgaacacttctgattttgacagcaagaccgtggagaactgtgtctgcacactgagaaacttgtcttatcgtctggaattagaagttcctcaggctcgaatgctgggaataaatgaaatggacggcttctgcaaggaatcccccagcaaagactctgactccagctgttgggggaaaaagaagaaaaagaaaagaaagcccccgcaggaagacttgtgggatggagttggtcctattcctgggctttcccagtcccccaaaggagtggaaatgctgtggcacccatcagtagtcaagccatatctgactcttctagcggaaagctctaaccctgcaacactggagggttctgctgggtctttacagaatctgtctgccgggaactggaagtttgcagcatacatcagagctgcggtaaggaaggagaagggacttcctattctggttgaactcctgagaatggataatgatagggttgtttcttctgttgctacagcattaagaaatatggcattagatgtccgcaacaaagagcttattggtaaatatgctatgcgggacttggcaaaccgactccctggaggtaatgggccaaacattttatctgacgacactgtggctgcaatctgttgtgctttgaacgaggtatcaagcaagaacatggagaatgctaaagctctggctgacacaggaggaattgagaagctggtgaatatcacaaaaggaaagggagacagatcttcactgaaagtggttaaagctgccgcccaagtcctaaacacattatggcaatatcgagaccttcgtagcatttataagaaggacggctggaatcagtctcattttatcactccagtatcaacactagagcgtgagcgtttcaagtctcacccttccttatccaccaccaatcagcagatgtcacccatgatccagtcagtgggcagcacctcctcttcaccagcactgttaggaatacgggaacctcactctggttatgagagaacacaaccctctatgcaatactataacagccagggagaccccatctctaacaaggaaatgtacactgggtccagcaaagcatctccgatctacatcggctcctattcatcaccagcacgagagcagaacaggcggcagcagcatcaccagctgtactatagtcatgaagactcaaataggaaaaactatgatgcataccgattgtatttgcagtctccacacagctacgaagacccatattttgacgagcgtgtccactacacgacgactgcggatcagaatgcgcaatatggactcaaatcgaccacaaactatgtagacttttactccactagaagaccttcctatagatcagaacagtacccagggtcgccggactcgtgggtg

SEQ ID NO: 38 - protein, 1265 aa, Xenopus laevis
DVTRKAPEPGAGSVFWGEGGRVWAPHHGDRVRGSTSGSYTAPWERDRAVPHEADGPAGRLEPAGGMPVPGQTSLMEEALQKITQAAPSNTGMEPETTATNILASVKEQELQFERLTRELEVERQIVANQLERCRLGAESPSIASVSSTEKSFPWRSGDVPAGGPSKPRLSDSSHPNHFLIRSEPEPMAVYSPEQSSLHESEGSMGNSRSSTQMNSYSDSGYQEAGSFHNNNIGKAELRAQLSFTGSTGNHVVRNSRAEGQTLVQPPPPNTMAGSRAVRRVSSVPSRSQSPSYVIGSGVSPSRGSLRTSVGSGYGSPTISDPRPLATSNTYSSTTLPSQRAASPYTSHRANSPTVTLRIGSLNSRQLANPNTMTSSYQTLGSSARVGSPLTLSDAHSRVGSSSQAPMGSSSSPKRAGMTAVPQHMGTLQRNLHDIDQYGQQHYDIYERMVPSRPDSLTGLRSSYASQHSQLGQELRSTVSPDLQITPIYEGRTYYSPVYRNANHAAIELRQGSHTAIYRTGSGSGNLQRTMSNRSTLAYQRNNYALNTAANYAEPYRSMQYRISESGYNRMPHTAPPDDGTTRSPSIDSIQKDPREFAWRDPELPEVIYMLQHHFPSVQANAAAYLQHLCFGDHKTKIEVCRLGGIKHLVDLLDNKVLEVQKNACGALRNLVYGKSTDENKIAVKNAGGVPALLRLLRKTNDQEVRELVTGVLWNLSSCDAVKMTIIRDALSPLTNTVIVPHSGFNNSSFDDDHKMKFQSSSVLRNTTGCMRNLSSAGEEARKQMRYCEGLVDSLLFVIQTCVNTSDFDSKTVENCVCTLRNLSYRLELEVPQARMLGINEMDGFCKESPSKDSDSSCWGKKKKKKRKPPQEDLWDGVGPIPGLSQSPKGVEMLWHPSVVKPYLTLLAESSNPATLEGSAGSLQNLSAGNWKFAAYIRAAVRKEKGLPILVELLRMDNDRVVSSVATALRNMALDVRNKELIGKYAMRDLANRLPGGNGPNILSDDTVAAICCALNEVSSKNMENAKALADTGGIEKLVNITKGKGDRSSLKVVKAAAQVLNTLWQYRDLRSIYKKDGWNQSHFITPVSTLERERFKSHPSLSTTNQQMSPMIQSVGSTSSSPALLGIREPHSGYERTQPSMQYYNSQGDPISNKEMYTGSSKASPIYIGSYSSPAREQNRRQQHHQLYYSHEDSNRKNYDAYRLYLQSPHSYEDPYFDERVHYTTTADQNAQYGLKSTTNYVDFYSTRRPSYRSEQYPGSPDSWV

SEQ ID NO: 39 - DNA, 6816 bp, Homo sapiens
  CDS (1)..(6816)
atgagctgcaacggaggctcccacccgcggatcaacactctgggccgcatgatccgcgccgagtctggcccggacctgcgctacgaggtgaccagcggcggcgggggcaccagcaggatgtactattctcggcgcggcgtgatcaccgaccagaactcggacggctactgtcaaaccggcacgatgtccaggcaccagaaccagaacaccatccaggagctgctgcagaactgctccgactgcttgatgcgagcagagctcatcgtgcagcctgaattgaagtatggagatggaatacaactgactcggagtcgagaattggatgagtgttttgcccaggccaatgaccaaatggaaatcctcgacagcttgatcagagagatgcggcagatgggccagccctgtgatgcttaccagaaaaggcttcttcagctccaagagcaaatgcgagccctttataaagccatcagtgtccctcgagtccgcagggccagctccaagggtggtggaggctacacttgtcagagtggctctggctgggatgagttcaccaaacatgtcaccagtgaatgtttggggtggatgaggcagcaaagggcggagatggacatggtggcctggggtgtggacctggcctcagtggagcagcacattaacagccaccggggcatccacaactccatcggcgactatcgctggcagctggacaaaatcaaagccgacctgcgcgagaaatctgcgatctaccagttggaggaggagtatgaaaacctgctgaaagcgtcctttgagaggatggatcacctgcgacagctgcagaacatcattcaggccacgtccagggagatcatgtggatcaatgactgcgaggaggaggagctgctgtacgactggagcgacaagaacaccaacatcgctcagaaacaggaggccttctccatacgcatgagtcaactggaagttaaagaaaaagagctcaataagctgaaacaagaaagtgaccaacttgtcctcaatcagcatccagcttcagacaaaattgaggcctatatggacactctgcagacgcagtggagttggattcttcagatcaccaagtgcattgatgttcatctgaaagaaaatgctgcctactttcagttttttgaagaggcgcagtctactgaagcatacctgaaggggctccaggactccatcaggaagaagtacccctgcgacaagaacatgcccctgcagcacctgctggaacagatcaaggagctggagaaagaacgagagaaaatccttgaatacaagcgtcaggtgcagaacttggtaaacaagtctaagaagattgtacagctgaagcctcgtaacccagactacagaagcaataaacccattattctcagagctctctgtgactacaaacaagatcagaaaatcgtgcataagggggatgagtgtatcctgaaggacaacaacgagcgcagcaagtggtacgtgacgggcccgggaggcgttgacatgcttgttccctctgtggggctgatcatccctcctccgaacccactggccgtggacctctcttgcaagattgagcagtactacgaagccatcttggctctgtggaaccagctctacatcaacatgaagagcctggtgtcctggcactactgcatgattgacatagagaagatcagggccatgacaatcgccaagctgaaaacaatgcggcaggaagattacatgaagacgatagccgaccttgagttacattaccaagagttcatcagaaatagccaaggctcagagatgtttggagatgatgacaagcggaaaatacagtctcagttcaccgatgcccagaagcattaccagaccctggtcattcagctccctggctatccccagcaccagacagtgaccacaactgaaatcactcatcatggaacctgccaagatgtcaaccataataaagtaattgaaaccaacagagaaaatgacaagcaagaaacatggatgctgatggagctgcagaagattcgcaggcagatagagcactgcgagggcaggatgactctcaaaaacctccctctagcagaccaggggtcttctcaccacatcacagtgaaaattaacgagcttaagagtgtgcagaatgattcacaagcaattgctgaggttctcaaccagcttaaagatatgcttgccaacttcagaggttctgaaaagtactgctatttacagaatgaagtatttggactatttcagaaactggaaaatatcaatggtgttacagatggctacttaaatagcttatgcacagtaagggcactgctccaggctattctccaaacagaagacatgttaaaggtttatgaagccaggctcactgaggaggaaactgtctgcctggacctggataaagtggaagcttaccgctgtggactgaagaaaataaaaaatgacttgaacttgaagaagtcgttgttggccactatgaagacagaactacagaaagcccagcagatccactctcagacttcacagcagtatccactttatgatctggacttgggcaagttcggtgaaaaagtcacacagctgacagaccgctggcaaaggatagataaacagatcgactttaggttatgggacctggagaaacaaatcaagcaattgaggaattatcgtgataactatcaggctttctgcaagtggctctatgatgctaaacgccgccaggattccttagaatccatgaaatttggagattccaacacagtcatgcggtttttgaatgagcagaagaacttgcacagtgaaatatctggcaaacgagacaaatcagaggaagtacaaaaaattgctgaactttgcgccaattcaattaaggattatgagctccagctggcctcatacacctcaggactggaaactctgctgaacatacctatcaagaggaccatgattcagtccccttctggggtgattctgcaagaggctgcagatgttcatgctcggtacattgaactacttacaagatctggagactattacaggttcttaagtgagatgctgaagagtttggaagatctgaagctgaaaaataccaagatcgaagttttggaagaggagctcagactggcccgagatgccaactcggaaaactgtaataagaacaaattcctggatcagaacctgcagaaataccaggcagagtgttcccagttcaaagcgaagcttgcgagcctggaggagctgaagagacaggctgagctggatgggaagtcggctaagcaaaatctagacaagtgctacggccaaataaaagaactcaatgagaagatcacccgactgacttatgagattgaagatgaaaagagaagaagaaaatctgtggaagacagatttgaccaacagaagaatgactatgaccaactgcagaaagcaaggcaatgtgaaaaggagaaccttggttggcagaaattagagtctgagaaagccatcaaggagaaggagtacgagattgaaaggttgagggttctactgcaggaagaaggcacccggaagagagaatatgaaaatgagctggcaaaggcatctaataggattcaggaatcaaagaatcagtgtactcaggtggtacaggaaagagagagccttctggtgaaaatcaaagtcctggagcaagacaaggcaaggctgcagaggctggaggatgagctgaatcgtgcaaaatcaactctagaggcagaaaccagggtgaaacagcgcctggagtgtgagaaacagcaaattcagaatgacctgaatcagtggaagactcaatattcccgcaaggaggaggctattaggaagatagaatcggaaagagaaaagagtgagagagagaagaacagtcttaggagtgagatcgaaagactccaagcagagatcaagagaattgaagagaggtgcaggcgtaagctggaggattctaccagggagacacagtcacagttagaaacagaacgctcccgatatcagagggagattgataaactcagacagcgcccatatgggtcccatcgagagacccagactgagtgtgagtggaccgttgacacctccaagctggtgtttgatgggctgaggaagaaggtgacagcaatgcagctctatgagtgtcagctgatcgacaaaacaaccttggacaaactattgaaggggaagaagtcagtggaagaagttgcttctgaaatccagccattccttcggggtgcaggatctatcgctggagcatctgcttctcctaaggaaaaatactctttggtagaggccaagagaaagaaattaatcagcccagaatccacagtcatgcttctggaggcccaggcagctacaggtggtataattgatccccatcggaatgagaagctgactgtcgacagtgccatagctcgggacctcattgacttcgatgaccgtcagcagatatatgcagcagaaaaagctatcactggttttgatgatccattttcaggcaagacagtatctgtttcagaagccatcaagaaaaatttgattgatagagaaaccggaatgcgcctgctggaagcccagattgcttcagggggtgtagtagaccctgtgaacagtgtctttttgccaaaagatgtcgccttggcccgggggctgattgatagagatttgtatcgatccctgaatgatccccgagatagtcagaaaaactttgtggatccagtcaccaaaaagaaggtcagttacgtgcagctgaaggaacggtgcagaatcgaaccacatactggtctgctcttgctttcagtacagaagagaagcatgtccttccaaggaatcagacaacctgtgaccgtcactgagctagtagattctggtatattgagaccgtccactgtcaatgaactggaatctggtcagatttcttatgacgaggttggtgagagaattaaggacttcctccagggttcaagctgcatagcaggcatatacaatgagaccacaaaacagaagcttggcatttatgaggccatgaaaattggcttagtccgacctggtactgctctggagttgctggaagcccaagcagctactggctttatagtggatcctgttagcaacttgaggttaccagtggaggaagcctacaagagaggtctggtgggcattgagttcaaagagaagctcctgtctgcagaacgagctgtcactgggtataatgatcctgaaacaggaaacatcatctctttgttccaagccatgaataaggaactcatcgaaaagggccacggtattcgcttattagaagcacagatcgcaaccggggggatcattgacccaaaggagagccatcgtttaccagttgacatagcatataagaggggctatttcaatgaggaactcagtgagattctctcagatccaagtgatgataccaaaggattttttgaccccaacactgaagaaaatcttacctatctgcaactaaaagaaagatgcattaaggatgaggaaacagggctctgtcttctgcctctgaaagaaaagaagaaacaggtgcagacatcacaaaagaataccctcaggaagcgtagagtggtcatagttgacccagaaaccaataaagaaatgtctgttcaggaggcctacaagaagggcctaattgattatgaaaccttcaaagaactgtgtgagcaggaatgtgaatgggaagaaataaccatcacgggatcagatggctccaccagggtggtcctggtagatagaaagacaggcagtcagtatgatattcaagatgctattgacaagggccttgttgacaggaagttctttgatcagtaccgatccggcagcctcagcctcactcaatttgctgacatgatctccttgaaaaatggtgtcggcaccagcagcagcatgggcagtggtgtcagcgatgatgtttttagcagctcccgacatgaatcagtaagtaagatttccaccatatccagcgtcaggaatttaaccataaggagcagctctttttcagacaccctggaagaatcgagccccattgcagccatctttgacacagaaaacctggagaaaatctccattacagaaggtatagagcggggcatcgttgacagcatcacgggtcagaggcttctggaggctcaggcctgcacaggtggcatcatccacccaaccacgggccagaagctgtcacttcaggacgcagtctcccagggtgtgattgaccaagacatggccaccaggctgaagcctgctcagaaagccttcataggcttcgagggtgtgaagggaaagaagaagatgtcagcagcagaggcagtgaaagaaaaatggctcccgtatgaggctggccagcgcttcctggagttccagtacctcacgggaggtcttgttgacccggaagtgcatgggaggataagcaccgaagaagccatccggaaggggttcatagatggccgcgccgcacagaggctgcaagacaccagcagctatgccaaaatcctgacctgccccaaaaccaaattaaaaatatcctataaggatgccataaatcgctccatggtagaagatatcactgggctgcgccttctggaagccgcctccgtgtcgtccaagggcttacccagcccttacaacatgtcttcggctccggggtcccgctccggctcccgctcgggatctcgctccggatctcgctccgggtcccgcagtgggtcccggagaggaagctttgacgccacagggaattcttcctactcttattcctactcatttagcagtagttctattgggcac

SEQ ID NO: 40 - protein, 2272 aa, Homo sapiens
MSCNGGSHPRINTLGRMIRAESGPDLRYEVTSGGGGTSRMYYSRRGVITDQNSDGYCQTGTMSRHQNQNTIQELLQNCSDCLMRAELIVQPELKYGDGIQLTRSRELDECFAQANDQMEILDSLIREMRQMGQPCDAYQKRLLQLQEQMRALYKAISVPRVRRASSKGGGGYTCQSGSGWDEFTKHVTSECLGWMRQQRAEMDMVAWGVDLASVEQHINSHRGIHNSIGDYRWQLDKIKADLREKSAIYQLEEEYENLLKASFERMDHLRQLQNIIQATSREIMWINDCEEEELLYDWSDKNTNIAQKQEAFSIRMSQLEVKEKELNKLKQESDQLVLNQHPASDKIEAYMDTLQTQWSWILQITKCIDVHLKENAAYFQFFEEAQSTEAYLKGLQDSIRKKYPCDKNMPLQHLLEQIKELEKEREKILEYKRQVQNLVNKSKKIVQLKPRNPDYRSNKPIILRALCDYKQDQKIVHKGDECILKDNNERSKWYVTGPGGVDMLVPSVGLIIPPPNPLAVDLSCKIEQYYEAILALWNQLYINMKSLVSWHYCMIDIEKIRAMTIAKLKTMRQEDYMKTIADLELHYQEFIRNSQGSEMFGDDDKRKIQSQFTDAQKHYQTLVIQLPGYPQHQTVTTTEITHHGTCQDVNHNKVIETNRENDKQETWMLMELQKIRRQIEHCEGRMTLKNLPLADQGSSHHITVKINELKSVQNDSQAIAEVLNQLKDMLANFRGSEKYCYLQNEVFGLFQKLENINGVTDGYLNSLCTVRALLQAILQTEDMLKVYEARLTEEETVCLDLDKVEAYRCGLKKIKNDLNLKKSLLATMKTELQKAQQIHSQTSQQYPLYDLDLGKFGEKVTQLTDRWQRIDKQIDFRLWDLEKQIKQLRNYRDNYQAFCKWLYDAKRRQDSLESMKFGDSNTVMRFLNEQKNLHSEISGKRDKSEEVQKIAELCANSIKDYELQLASYTSGLETLLNIPIKRTMIQSPSGVILQEAADVHARYIELLTRSGDYYRFLSEMLKSLEDLKLKNTKIEVLEEELRLARDANSENCNKNKFLDQNLQKYQAECSQFKAKLASLEELKRQAELDGKSAKQNLDKCYGQIKELNEKITRLTYEIEDEKRRRKSVEDRFDQQKNDYDQLQKARQCEKENLGWQKLESEKAIKEKEYEIERLRVLLQEEGTRKREYENELAKASNRIQESKNQCTQVVQERESLLVKIKVLEQDKARLQRLEDELNRAKSTLEAETRVKQRLECEKQQIQNDLNQWKTQYSRKEEAIRKIESEREKSEREKNSLRSEIERLQAEIKRIEERCRRKLEDSTRETQSQLETERSRYQREIDKLRQRPYGSHRETQTECEWTVDTSKLVFDGLRKKVTAMQLYECQLIDKTTLDKLLKGKKSVEEVASEIQPFLRGAGSIAGASASPKEKYSLVEAKRKKLISPESTVMLLEAQAATGGIIDPHRNEKLTVDSAIARDLIDFDDRQQIYAAEKAITGFDDPFSGKTVSVSEAIKKNLIDRETGMRLLEAQIASGGVVDPVNSVFLPKDVALARGLIDRDLYRSLNDPRDSQKNFVDPVTKKKVSYVQLKERCRIEPHTGLLLLSVQKRSMSFQGIRQPVTVTELVDSGILRPSTVNELESGQISYDEVGERIKDFLQGSSCIAGIYNETTKQKLGIYEAMKIGLVRPGTALELLEAQAATGFIVDPVSNLRLPVEEAYKRGLVGIEFKEKLLSAERAVTGYNDPETGNIISLFQAMNKELIEKGHGIRLLEAQIATGGIIDPKESHRLPVDIAYKRGYFNEELSEILSDPSDDTKGFFDPNTEENLTYLQLKERCIKDEETGLCLLPLKEKKKQVQTSQKNTLRKRRVVIVDPETNKEMSVQEAYKKGLIDYETFKELCEQECEWEEITITGSDGSTRVVLVDRKTGSQYDIQDAIDKGLVDRKFFDQYRSGSLSLTQFADMISLKNGVGTSSSMGSGVSDDVFSSSRHESVSKISTISSVRNLTIRSSSFSDTLEESSPIAAIFDTENLEKISITEGIERGIVDSITGQRLLEAQACTGGIIHPTTGQKLSLQDAVSQGVIDQDMATRLKPAQKAFIGFEGVKGKKKMSAAEAVKEKWLPYEAGQRFLEFQYLTGGLVDPEVHGRISTEEAIRKGFIDGRAAQRLQDTSSYAKILTCPKTKLKISYKDAINRSMVEDITGLRLLEAASVSSKGLPSPYNMSSAPGSRSGSRSGSRSGSRSGSRSGSRRGSFDATGNSSYSYSYSFSSSSIGH

SEQ ID NO: 41 - DNA, 8850 bp, Mus musculus
  CDS (1)..(8850)
atgagctgcaacggcggctcccacccgcggatcaacacgctgggtcgcatgacccgcgcggagtccggcccggacctgcgctacgagatgacctacagcgctctggctgagagggtgaccctggagaaagcactgtggcgcccaggattaggagctgccgaggaacccacggcacaaagggctgggtcctcttcccgggatagtcgggtaaatacagcgagggagtcactggtgggtgggagaagtcaaaccggcaccatgtctagacatcagaatcagaacaccatccaagaaatgctgcaaaattgctcagactgtctgatgcgggcggagctgatcgcgcagccggaactgaaattcggagaagggatgcagctggcatggaaccgagagctggatgagtattttacacaagccaacgatcagatggaaatcatagacggcttgatccgagagatgaggcagatgggccagccctgtgatgcgtatcagaaaaggcagcagcagcagcagaggcctctggtagagcttctgccttttcaagaggccaatgtcaagctttatttaatcaaactgcttcagctccaggaacaaatgcgagccctttacaaggccatcagcgtccctcgggtccgaagagccagctccaagggagccggagggtacacttgccagagtggatccggctgggacgagttcaccaaacgcctcacgggcgagtgtctgggctggatgaggcagcagagggaggaaatggacctgatggcctggggtgtggacgctggttcagtggaacagcacatcaatagccacaggagcatccacaacaccattggggactaccgctggcagctggacaagatcaaagcagacctgtgtctgctcagctctctccttcatggttctaagatccagaggatccgaaatcgtatttccttcagcaaggttttaagtgacagacgtgagaagtcagcaatctaccagttggaggaggaatatgaaaacctgctgaaagcctccttcgagaggatggaccacctgcgccagctgcagaacatcatccaggccacctctcgagagatcatgtggatcaatgactgcgaggaggaggagctgctctatgactggagcgacaagaacaccaacatcgctcagaagcaggaggccttctctatacgcatgagtcaactggaggtcaaggaaaaggaactcaataagcttaaacaagaaagtgaccagcttgtcctcaatcagcatccagcttcagacaaaattgaggcatacatggacactcttcagacgcagtggagctggattctgcagatcaccaagtgcattgatgtccatctcaaagaaaacgctgcttacttccagttttttgaagaggctcagtcaactgaagcctacctgaagggcctgcaggactccatcaggaagaaatacccctgtgacaagaatatgcctctccagcacctgctggagcagatcaaagagctggagaaagaacgggagaagatcattgaatacaagcgtcaggtgcagaacttggtaaacaagtccaagaagatcgtgcagctgaaacctcggaacccagactacaggagcaacaagcccattatcctcagggctctctgcgactacaaacaagaccagaaaatcgtacacaaaggggatgagtgtattctgaaggacaacaacgagcgcagcaagtggtacgtgacgggcccaggaggcgtggacatgcttgtcccttccgtgggcctgatcatcccgcctccgaacccactggctgtggacctttcttgcaagattgagcagtactatgaagccatcttggctctgtggaaccagctctacatcaacatgaagagcctggtgtcttggcactactgcatgattgacatcgagaagatcagagccatgactattgccaagctgaaaacgatgagacaagaagattacatgaagaccatcgaagaccttgagctccattaccaagacttcatcaagaacagccaaggctcggagatgtttggagacgacgacaagcggcggatgcagtcccagttcaccgatgcccagaagcattaccagaccctggtcattcagcttcctggccacccccagcaccagacagtcaccaaaaccgaaatcactcacctgggtacctgccaagatgtcaaccacaataaagtgatcgaaacgaaccgagaaaacgacaaacaggagacatggttgctgatggagctgcagaagatccgcaggcagatggagcattgtgaggccaggatgacgcttaaaaatctcctgctggcagagcaaggctctacacaccacatcaccgtgaaaatcaacgagctcaagagcgtacagaacgactcccaagccctggccgaggttctcaatcagcttaaagacatgcttgccaacttccgaggctctgaaaagtactgctacctgcagaatgagatatttggactgtttcagaagctggaaaatatcaatggtgtctcggatggctacttaaacagcctgtgttccgtgagagcccttctccaggctattctgcaaacggaagacatgctgaaggtctatgaagcgaggctgacggaagaggaaactgtctgtctggacctggataaagtagaggcttaccgctgcgggctgaagaaaataaaaaatgacttgaacttgaaaaagtcgctgttggccaccatgaagacggagctgcagaaggcacagcagatccactcccagtcctctcagcagtacccgctctatgacctggacctgggcaaattcactgagaaagtgacccagctgacggaccgctggcaaaagatagataaacagatagacttcagattgtgggacctggagaaacaaatcaaacaactgaggaattatcgggacaactatcagagcttctgcaagtggctatatgatgccaaacgccgccaggactctttagagtccatgaagtttggagattccaacacagtcatgcggtttttgaatgagcagaagaacctgcacagtgaaatatctggcaaacgagacaaatcagaagaagtgcataaaatcgctgaactttgcgcaaactcaattaaggattatgaactgcagctggcatcgtacacctcagggctggaaactctactgaacatacctatcaagaggaccatggttcagtccccatccggggtgattctgcaagaggctgcggacattcatgcgagatacattgaactgcttacgaggtctggagactactacagattcctaagtgagatgttgaagagtctggaagatctaaagctgaaaaacaccaagattgaagttttggaagaggagctaagactggcccgggatgccaactcggaaaattgcaataagaataagttcctagatcagaacctgcagaaataccaggcagagtgttcccagttcaaggccaagcttgtgagcctggaggagctcaagagacaagctgagctcgatggaaagtcagccaagcaaaacctagacaagtgctacggtcagatcaaggaactcaacgagaagatcacccggctgacctatgagatcgaagacgagaagcgccggagaaagaccgtggaggacaggttcgaccaacagaagaatgactatgatcagctgcagaaggcaaggcagtgtgagaaggagaacctcagctggcagaagctggagtctgagaaagccatcaaggagaaggagtacgagatagagaggttgagggttctgctgcaggaagagggcgcccggaagagagagtatgaaaatgagctggcaaaggtaagaaaccactataatgaggagatgagtaatttaaggaacaagtatgaaacagagattaacatcaccaagaccaccatcaaggagatatccatgcagaaggaagacgattccaagaatctcagaaaccagatggacagactctcccgggagaaccgagatcttaaggatgagatagtcaggctcaatgacagcatcttgcaggccacggagcagcgaaggagagccgaggagaacgccctgcagcagaaagcctgtggctcggaaaccatgcagaagaagcagcgcctggagattgaactgaagcaggtcatccagcagcgctcagaggacaacgccaggcacaagcagtccctggaggaggctgccaagaccatccaggacaagaacaaagagatcgaaaggctcaaagctgagtatcaggaggaggccaagcggcgctgggaatacgaaaatgaactgagtaaggtaaggaacagttacgatgaggagatcattagcttaaaaaaccagttcgagaccgagatcaacatcaccaagaccacgatccaccagctgaccatgcagaaggaagaggacaccagtggctaccgagcgcagatagacaatctcacccgagaaaacaggagcttgtgtgaggaggtcaagaggctgaagaacactctagcccagaccaccgagaacctcaggagggtcgaagagaacgcccagcagcagaaggccactggctcagagatgtctcagaggaaacagcagttggagatcgagctccgacaggtcactcagatgcgaactgaagagagcatgaggtacaagcagtccctcgatgacgctgccaagaccatccaggataagaacaaggagatcgaaaggctcaaacagctggtcgacaaagaaaccaatgagaggaagtgcctggaggacgaaaattccaagttgcagagagtccagtatgacctgcagaaagccaacaacagcgccacggaggccatgagcaaactgaaggttcaggaacaggagttaacgcgcctacggattgactatgagagggtgtcccaggagaggaccgtgaaggatcaggacatcacgaggatccagagctccctgaaggatctgcagctgcagaagcagaaagcggaagaggagctgagtaggctgaagagaacagcctccgacgagtcctccaagaggaagatgctggaggaggaactggaggccatgaggaggtctttgaaagagcaagccgtcaaaatcaccaacctgacccagcagctggagcaggcgtccattgttaagaagaggagcgaggatgacctcaggcagcagagggatgtgctggatggccacgtgagggagaagcagaggacccaggaggagctgaggaggctctccttggatgtcgaggccctccggcggcagctggtccaggaacaggagaatgtcaagcaggctcacttgaggaatgagcatttccagaaggccatagaagacaaaagcaggagcctcaatgagagtaaaatagagatcgaaaggctacagtcgctcacggagaacctgaccaaggaacacttgatgctggaggaagagctgaggaacctgaggctggagtacgacgacctgcggaggggccggagtgaagcggacagcgataaaaactcaaccatctccgagctaaggagccaactgcagatcagcaacaatcgaaccctcgagctgcaggggctgattaatgatttacagagagagagggaaaatttgagacaggaaattgagaaattccaaaagcaggctttagaggcatctaataggatccaggagtcaaagagtcagtgcactcaagttgttcaggagagagagagcctgctggtgaagatcaaagtcctggagcaagacaaggcgaggctgcagcggctggaggatgagctgaaccgtgccaaagcaacgctggaggcagaaagccgggtgaaacagcgtctggagtgtgagaagcagcagatccagaacgacctgaaccagtggaaaactcagtattcccgcaaggaggagaccattaggaagatagagtcggaaagagagaagagcgagcgagaaaagaacagtctcaggagtgagatcgagaggctccaggcggagatcaagaggatcgaagagagatgcaggaggaagctagaggattcttctagggagactcagtcccagctggaatccgaacgctgcaggcttcagaaggagatcgagaaactcaggcagcgcccctacgggtcccatcgggagacccagacggaatacgagtggaccgttgattcctccaagctggtatttgatgggctgaggaagaaggtgacggcaatgcagctctatgagtgccagctgatcgacaagacgacgctagacaagctgttgaaggggaagaagtcagtggaggaggtggcctcagagatccagcctttcctgcgcggcgcaggcgccatcgccggggcttccgcttctcccaaggaaaagtactctttggtggaggccaagagaaagaaattcatcaccccagaatccactgtcatgcttctggaggcccaggcagccaccggtggtatcatcgatccccatcggaatgagaagctcactgtggacaatgccgtagcccgggatctcatcgacttcgacgaccgccaacagatctacacagcggagaaagccatcactggtttcgatgacccgttttcgggcaagacggtctctgtttcagaagccatcaagaagaatttgatcgacagagaaaccggaatgcgcctgctggaagcccagcttgcttcagggggtgtagttgatccagtcaacagtgtcttcttgccaaaagatgtcgccttggcccgtgggctgattgatagagatttgtatcgctccttgaacgatccccgagatagtcagaagaacttcgtggatccaatcaccaagaagaaggtcagctacatgcagctgagagaaaggtgcagaatcgaaccccacacgggtctgctcctgctgtcagtacagaagagaagcatgtccttccagggaatcagacaacccgtgaccgtcaccgaactggttgattctggcatattgagaccgtccactgtaaacgaactggaatccggtcagatttcctatgatgaggttggggagagaatcaaggacttcctccagggttcaagctgcatagcaggcatatataatgagaccactaagcagaagctgggcatctatgaggccatgaaaataggcttagttcgacctggtaccgccctggagttgctggaagcccaagcagctactggctttattgtggatcccgtcagcaatttaaggctacctgtggaggaagcctacaagagaggtctggtgggcattgagttcaaagagaagcttctgtctgcggaacgagccgtcactggctacaacgatcctgagaccggaaacatcatctctttattccaagcaatgaacaaggagctcatcgaaaagggccatggcattcgcttgctggaggcacagatcgcaaccggcggcatcatcgacccgaaggagagccatcggttaccggttgacatggcgtataagaggggttattttaatgaggagcttagcgaaatcctctcagacccaagtgatgataccaaaggctttttcgatccaaacacagaagaaaacctcacctatctgcaactgaaggagagatgcatcaaagatgaggaaacagggctctgcctgctgcccctgaaagagaagaagaaacaggtgcagacttctcagaagaacacgctcagaaagcggcgggtggtcatagttgacccggaaaccaataaggagatgtctgttcaggaggcctacaagaaaggtctcattgattatgacaccttcaaggagctatgtgaacaagagtgcgaatgggaagaaataaccatcacaggatcagacggctccaccagggtggtcttagtggacaggaagaccggcagtcagtatgacattcaagatgctattgacaagggcctcgttgacaggaagttcttcgatcaataccgatcaggcagccttagcctcacacagtttgctgacatgatctccttgaaaaacggcgtcggcaacagcagcggcttgggtgggagtgtcaacgatgatgtttttagcagctcccgacacgactccgtgagtaagatttccaccatatccagtgtcagaaatctaaccatccgaagcagctctctgtcagaccctctggaggagtcaagccccattgcggccatctttgacacagagaacctggagaaaatctcgatcgcagaaggtatagagcggggcattgtggatagcatcaccggtcagaggcttctggaggctcaggcctgcactggtggcatcattcaccctaccactggtcagaagctctcccttcaagatgcagtcaaccagggtctcattgaccaagacatggccaccaggctgaagcctgcccagaaggccttcatcggctttgaaggggtaaaaggaaagaagaagatgtcggcagcagaggcagtcaaagagaaatggcttccctacgaggcaggccagcgcttcctggagttccagttcctcacgggaggccttgttgacccggaagtgcatgggaggatcagcaccgaagaagccatccgcaaaggtttcatcgatggccgtgcagctcagaggttgcaggacatcagcagctatgccaaaatcctcacctgccccaaaaccaagttaaaaatctcctacaaggatgccatgaatcgctccatggtggaagacatcactgggttgcgccttctggaagccgcctccgtgtcctcgaagggtttgcctagcccttataacatgtcagccccaggctcccgctctggttcaaggtccggatctcgctcaggctcccgctctggctcccgcagcgggtctcggagaggaagcttcgatgctacgggcaattcttcttactcctattcctattcatttagcagtagctccattggggggtactag

SEQ ID NO: 42 - protein, 2949 aa, Mus musculus
MSCNGGSHPRINTLGRMTRAESGPDLRYEMTYSALAERVTLEKALWRPGLGAAEEPTAQRAGSSSRDSRVNTARESLVGGRSQTGTMSRHQNQNTIQEMLQNCSDCLMRAELIAQPELKFGEGMQLAWNRELDEYFTQANDQMEIIDGLIREMRQMGQPCDAYQKRQQQQQRPLVELLPFQEANVKLYLIKLLQLQEQMRALYKAISVPRVRRASSKGAGGYTCQSGSGWDEFTKRLTGECLGWMRQQREEMDLMAWGVDAGSVEQHINSHRSIHNTIGDYRWQLDKIKADLCLLSSLLHGSKIQRIRNRISFSKVLSDRREKSAIYQLEEEYENLLKASFERMDHLRQLQNIIQATSREIMWINDCEEEELLYDWSDKNTNIAQKQEAFSIRMSQLEVKEKELNKLKQESDQLVLNQHPASDKIEAYMDTLQTQWSWILQITKCIDVHLKENAAYFQFFEEAQSTEAYLKGLQDSIRKKYPCDKNMPLQHLLEQIKELEKEREKIIEYKRQVQNLVNKSKKIVQLKPRNPDYRSNKPIILRALCDYKQDQKIVHKGDECILKDNNERSKWYVTGPGGVDMLVPSVGLIIPPPNPLAVDLSCKIEQYYEAILALWNQLYINMKSLVSWHYCMIDIEKIRAMTIAKLKTMRQEDYMKTIEDLELHYQDFIKNSQGSEMFGDDDKRRMQSQFTDAQKHYQTLVIQLPGHPQHQTVTKTEITHLGTCQDVNHNKVIETNRENDKQETWLLMELQKIRRQMEHCEARMTLKNLLLAEQGSTHHITVKINELKSVQNDSQALAEVLNQLKDMLANFRGSEKYCYLQNEIFGLFQKLENINGVSDGYLNSLCSVRALLQAILQTEDMLKVYEARLTEEETVCLDLDKVEAYRCGLKKIKNDLNLKKSLLATMKTELQKAQQIHSQSSQQYPLYDLDLGKFTEKVTQLTDRWQKIDKQIDFRLWDLEKQIKQLRNYRDNYQSFCKWLYDAKRRQDSLESMKFGDSNTVMRFLNEQKNLHSEISGKRDKSEEVHKIAELCANSIKDYELQLASYTSGLETLLNIPIKRTMVQSPSGVILQEAADIHARYIELLTRSGDYYRFLSEMLKSLEDLKLKNTKIEVLEEELRLARDANSENCNKNKFLDQNLQKYQAECSQFKAKLVSLEELKRQAELDGKSAKQNLDKCYGQIKELNEKITRLTYEIEDEKRRRKTVEDRFDQQKNDYDQLQKARQCEKENLSWQKLESEKAIKEKEYEIERLRVLLQEEGARKREYENELAKVRNHYNEEMSNLRNKYETEINITKTTIKEISMQKEDDSKNLRNQMDRLSRENRDLKDEIVRLNDSILQATEQRRRAEENALQQKACGSETMQKKQRLEIELKQVIQQRSEDNARHKQSLEEAAKTIQDKNKEIERLKAEYQEEAKRRWEYENELSKVRNSYDEEIISLKNQFETEINITKTTIHQLTMQKEEDTSGYRAQIDNLTRENRSLCEEVKRLKNTLAQTTENLRRVEENAQQQKATGSEMSQRKQQLEIELRQVTQMRTEESMRYKQSLDDAAKTIQDKNKEIERLKQLVDKETNERKCLEDENSKLQRVQYDLQKANNSATEAMSKLKVQEQELTRLRIDYERVSQERTVKDQDITRIQSSLKDLQLQKQKAEEELSRLKRTASDESSKRKMLEEELEAMRRSLKEQAVKITNLTQQLEQASIVKKRSEDDLRQQRDVLDGHVREKQRTQEELRRLSLDVEALRRQLVQEQENVKQAHLRNEHFQKAIEDKSRSLNESKIEIERLQSLTENLTKEHLMLEEELRNLRLEYDDLRRGRSEADSDKNSTISELRSQLQISNNRTLELQGLINDLQRERENLRQEIEKFQKQALEASNRIQESKSQCTQVVQERESLLVKIKVLEQDKARLQRLEDELNRAKATLEAESRVKQRLECEKQQIQNDLNQWKTQYSRKEETIRKIESEREKSEREKNSLRSEIERLQAEIKRIEERCRRKLEDSSRETQSQLESERCRLQKEIEKLRQRPYGSHRETQTEYEWTVDSSKLVFDGLRKKVTAMQLYECQLIDKTTLDKLLKGKKSVEEVASEIQPFLRGAGAIAGASASPKEKYSLVEAKRKKFITPESTVMLLEAQAATGGIIDPHRNEKLTVDNAVARDLIDFDDRQQIYTAEKAITGFDDPFSGKTVSVSEAIKKNLIDRETGMRLLEAQLASGGVVDPVNSVFLPKDVALARGLIDRDLYRSLNDPRDSQKNFVDPITKKKVSYMQLRERCRIEPHTGLLLLSVQKRSMSFQGIRQPVTVTELVDSGILRPSTVNELESGQISYDEVGERIKDFLQGSSCIAGIYNETTKQKLGIYEAMKIGLVRPGTALELLEAQAATGFIVDPVSNLRLPVEEAYKRGLVGIEFKEKLLSAERAVTGYNDPETGNIISLFQAMNKELIEKGHGIRLLEAQIATGGIIDPKESHRLPVDMAYKRGYFNEELSEILSDPSDDTKGFFDPNTEENLTYLQLKERCIKDEETGLCLLPLKEKKKQVQTSQKNTLRKRRVVIVDPETNKEMSVQEAYKKGLIDYDTFKELCEQECEWEEITITGSDGSTRVVLVDRKTGSQYDIQDAIDKGLVDRKFFDQYRSGSLSLTQFADMISLKNGVGNSSGLGGSVNDDVFSSSRHDSVSKISTISSVRNLTIRSSSLSDPLEESSPIAAIFDTENLEKISIAEGIERGIVDSITGQRLLEAQACTGGIIHPTTGQKLSLQDAVNQGLIDQDMATRLKPAQKAFIGFEGVKGKKKMSAAEAVKEKWLPYEAGQRFLEFQFLTGGLVDPEVHGRISTEEAIRKGFIDGRAAQRLQDISSYAKILTCPKTKLKISYKDAMNRSMVEDITGLRLLEAASVSSKGLPSPYNMSAPGSRSGSRSGSRSGSRSGSRSGSRRGSFDATGNSSYSYSYSFSSSSIGGY

SEQ ID NO: 43 - DNA, 6921 bp, Rattus norvegicus
  CDS (1)..(6921)
atgagctgcaacggcggctcccacccgcggatcaacacgctgggtcgcatgacccgcgcggagatgtactactcccggcgctgcactgtcaacgaccagaactccgacggctactggtgggtaccggccggccgccacctagctcaggctgggacctttggccagggagttgcccgtctcctgggccgaccaggaaacccaggtctaggccgaggaaagtgcattgccccgggtcacggaaggcaggacccggtatccctacgcccagcgctcacccctgtgaacagggagcgtggtcaaaccggcaccatgtccaggcatcagaaccagaacactatccaagaacttctgcaaaactgcgcagactgtctgatgcgggcagagctgatcgcacagccggaactgaagttcggagaaggaatccagctggcgtggaacagagaactggatgagtatttcactcaagccaatgatcagatggaaatcatagatggcttgatccgggagatgaggcagatgggccagccctgtgatgcgtatcagaaaagactgcttcagctccaggaacagatgcgagccctgtacaaggccatcagtgcccctcgagtgcgaagggccagctccaagggagggtacacttgtcagagtggctccgggtgggatgaattcaccaaacgcctgacgggcgagtgcctgggctggatgaggcagcagagggcggaaatggacctgatggcctggggtgtggactctggttcagtggagcagcacatcaacagccacaggagtatccacaatgccatcggagactaccgctggcaactggacaagatcaaagcagacctgcgtgagaagtccgcaatctatcaattggaggaggaatatgaaaacctgctgaaagcctccttcgagaggatggaccacctgcgccagttgcaaaacatcatccaggccacctcgagagagatcatgtggatcaatgactgtgaggaggaggagctgctgtatgactggagcgacaagaacacaaacatcgctcagaagcaggaggccttctctatccgcatgagtcaactggaagtcaaggaaaaggagctcaacaagcttaaacaagaaagtgaccaacttgtcctcaatcagcatccagcgtcagacaaaatcgaggcatatatggatactcttcagacacagtggagttggattctgcaaatcaccaagtgcatcgatgtccacctcaaagaaaatgctgcctactttcagttttttgaagaggcccagtcaactgaagcctacctgaagggactgcaggactccatcaggaagaaatacccctgtgacaagaacatgcccctccagcacctgctggagcagatcaaagagctggagaaagaacgggagaagatcctggaatacaagcgtcaggtgcagaacttggtgaacaagtccaagaagatcgtgcagctgaagcctcggaacccagactacagaagcaacaaacccattattctcagggccctctgcgactacaaacaagaccagaaaatcgtccacaagggggatgaatgcatcctcaaggacaacaatgagcgcagcaagtggtacgtgaccggccccggaggcgttgacatgcttgtcccttctgtgggcctgatcatccctcctccaaacccactggctgtggacctttcttgcaagattgagcagtactatgaagccatcttggctctgtggaaccagctctacatcaacatgaagagcctggtgtcttggcattactgtatgattgacatcgagaagatcagagccatgactattgccaagctgaaaaccatgagacaggaagattacatgaagaccattgaagacctggagctccattaccaagacttcatcaaaaacagccaaggctcggagatgttcggagacgatgacaaacggaggatgcagtctcagttcactgatgcccagaagcattaccagaccctggtcattcagcttcctggccacccccagcaccagacagtcaccaaaactgaaatcactcacgtgggtacctgccaggatgtcaaccacaataaagtaattgagactaacagagagaacgacaaacaggagacgtggctgctgatggagctgcagaagatccgcaggcagatggagcactgcgaggccagaatgacactcaaaaatctgctgctcacagaccagggctctacacacaacatcaccgtgaaaatcaacgagctcaagagtgtacagaacgactcacaagctctggccgaggttctcaatcagcttaaagacatgcttgccaacttccgagggtctgaaaagtactgctatttacagaatgagatatttggactatttcagaagctggaaaatatcaatggtgtcacagatggctacttaaacagcctgtgctctgtgagagcccttctccaggcaattctgcaaacggaagacatgttgaaggtctacgaagcgaggctgacggaggaggaaactgtctgtctggacctggataaagtggaggcttaccgctgcgggctgaagaaaataaaaaatgacttgaacttgaaaaagtcactgttggccaccatgaagacggagctgcagaaggcacagcagattcactcccagtcttcacagcagtacccgctctatgacctggacctgggcaaattcactgagaaagtgacacagctgacggatcgctggcaaaagatagataagcagatagactttagattgtgggacctggagaaacaaatcaaacaactgaggaattatcgtgacaactatcagagcttctgcaagtggctgtatgatgccaaacgccgccaggactctttggagtccatgaagttcggagattccaacacagtcatgcggtttttgaatgagcagaagaacctgcacaatgaaatatctggcaaacgggataaatcagaagaagtacataaaattgctgagctttgcgcaaactcaattaaggattatgaactccagctggcgtcatacacctcagggctggaaactctactgaacatacctattaagaggaccatggttcagtccccatctggggctgcggacatccatgcaaggtacatcgagctacttacaaggtctggagactactacagattcttaagtgagatgctgaagagcctagaagatctgaagctgaaaaacaccaagattgaagttttggaagaggagctaagactggcccgggatgccaactcggaaaattgcaataagaataagttcctagatcagaacctgcagaaataccaggccgagtgttcccagttcaaagcaaagcttgtgagcctggaggagctgaagagacaagctgagctggatgggaagtcagccaagcaaaacctagacaagtgctacggtcagatcaaagagctcaatgaaaagatcacccggctgacctatgagatcgaagacgagaagcgcaggagaaagaccgtggaggacaggttcgaccaacagaagaatgactatgatcagctgcagaaggcaaggcagtgtgaaaaggagagccttggctggcagaagctggagtctgagaaagccatcaaggagaaggagtacgagatagagaggttgagggttctgctgcaggaagagggcgcccggaagagagaatatgaaaatgagctggcaaaggcatctaataggattcaggagtcaaagagtcagtgcactcaagtcgttcaggagagagagagcctgctggtgaagattaaggtcctggagcaagacaaggcaaggctgcagcggctggaggacgagctgaaccgtgccaaagcaacgctggaggcagaaacccgggtgaaacagcgcctagagtgtgagaagcagcagatccagaacgacctgaaccagtggaaaactcaatactcccgcaaggaggagaccattaggaagatagagtcggaaagagagaagagtgagagagagaagaacagtcttaggagtgagattgagagactccaggcagagatcaagaggattgaagagaggtgcaggcggaagctagaggattctaccagggagactcagtcccagctggaaacggaacgctgcaggcttcagaaggagattgacaaactcaggcagcgcccctatgggtcccatcgggagacccagacagagtacgagtggaccgttgattcctccaagctggtatttgacggactgaggaagaaggtgacagcaatgcagctctatgagtgccagttgattgacaagacaacactggacaagctattgaaggggaagaagtcagtggaggaggtggcttcagagatccagcctttcctgcggggtgcgggggccatcgctggtgcttctgcttctcccaaggaaaaatactctttggtggaggccaagagaaagaaattcatcaccccagaatccacagtcatgcttctggaggcccaggcggccactggtggtatcatcgatccccatcggaatgagaagctcacggtggacaatgccatagctcgggacctcattgactttgatgaccgccaacagatctacacagccgagaaagccatcactggttttgatgacccgttttcaggcaagaccgtatctgtttcagaagccatcaagaagaatttgattgacagagaaaccggaatgcgcctgctggaagcccagcttgcttcagggggtgtagttgatccagtcaacagtgtctttttgccaaaagatgtagccttggcccgtgggctgattgatagggatttgtatcgctccttgaatgacccccgagatagccagaagaacttcgtggatccaatcaccaagaagaaggtcagctacatgcagctgagagaacggtgcagaatcgaaccccacacgggtctgctcctgctgtcagtacagaagagaagcatgtccttccaaggaatcagacagccagtgaccgtcaccgaactggttgattctggcatattgagaccatccaccgtaaatgaactggaatctggtcagatttcttatgacgaggttggcgagagaattaaggacttcctccaggggtcaagctgcatagcaggtatttataatgagaccacgaaacagaagcttggcatctacgaggctatgaaaattggcttagttcgacctggtaccgctctggagttgctggaagcccaagcagctactggttttatagtagatcctgtcagcaatttaaggttacctgtggaggaagcctacaaaagaggtctggtgggcattgagttcaaagagaagcttctctctgcagaacgagctgtcactggctataacgatcctgaaaccggaaacatcatctctttgttccaagcgatgaacaaggaactcatcgaaaagggccacggaattcgcttactggaggctcagatcgcaaccggcggtatcattgatccaaaggagagtcatcggttaccggttgacatggcttataagaggggctattttaacgaggagcttagcgaaatcctctcagacccaagtgatgataccaaaggctttttcgatcccaacactgaagaaaacctcacctatttgcaactgaaagaaaggtgcatcaaagatgaggagacggggctctgcctgctgcctctgaaagaaaagaagaaacaggtgcagacttcacagaagaacaccctcagaaagcggcgggtggtaatagttgacccagaaaccaacaaagagatgtctgttcaggaggcgtacaagaaaggccttattgattatgaaaccttcaaagagctgtgtgagcaggagtgtgaatgggaagaaataaccatcacgggttcggatggctccaccagggtagtcctagtagacaggaagacgggcagtcagtatgacattcaagatgctattgacaaaggcctcgtcgacaggaagttcttcgatcaataccgatccggcagcctcagcctcacgcagtttgcggacatgatctccttgaagaatggcgttggcaccagcagcggcttgagcgggagtgtcaacgatgatgtgtttagcagctctcgacacgaatccgtgagtaagatttccaccatatccagcgtcagaaatttaaccatccgaagcagctctctgtctgaccccctggaggagtcaagccccattgcggccatctttgacacagaaaacctggagaaaatctccattacagaaggtatagagcggggcattgtggatagcatcactggtcagaggcttctggaagctcaggcctgcacgggtggcatcatccaccctaccaccggtcagaagctgtcccttcaagacgcagtctcccagggtctcattgaccaagacatggccaccaggctgaagcccgcccagaaggccttcattggctttgaaggtgtcaaaggaaagaagaagatgtcagcagcagaggcagtgaaagaaaaatggctgccctacgaggcaggccagcgcttcctggagttccagttcctcaccggaggccttgttgacccggaagtacatgggaggatcagcaccgaagaagccatccgcaaaggtttcatcgatggccgtgcagctcagaggttgcaggacatcagcagctatgccaaaatcctcacctgccccaaaaccaaattaaaaatctcctacaaggatgccatgaatcgctccatggtggaagacatcactgggctgcgccttctggaagccgcctccgtgtcctcgaagggtttgcctagcccttataacatgtcggccccaggctcccgctctggctcgaggtccggatctcgctcaggctcccgctctggttcccgtagtgggtctcgaagaggaagcttcgatgcgaccgggaattcctcctactcctattcctattcatttagcagtagctccattgggtactag

SEQ ID NO: 44 - protein, 2306 aa, Rattus norvegicus
MSCNGGSHPRINTLGRMTRAEMYYSRRCTVNDQNSDGYWWVPAGRHLAQAGTFGQGVARLLGRPGNPGLGRGKCIAPGHGRQDPVSLRPALTPVNRERGQTGTMSRHQNQNTIQELLQNCADCLMRAELIAQPELKFGEGIQLAWNRELDEYFTQANDQMEIIDGLIREMRQMGQPCDAYQKRLLQLQEQMRALYKAISAPRVRRASSKGGYTCQSGSGWDEFTKRLTGECLGWMRQQRAEMDLMAWGVDSGSVEQHINSHRSIHNAIGDYRWQLDKIKADLREKSAIYQLEEEYENLLKASFERMDHLRQLQNIIQATSREIMWINDCEEEELLYDWSDKNTNIAQKQEAFSIRMSQLEVKEKELNKLKQESDQLVLNQHPASDKIEAYMDTLQTQWSWILQITKCIDVHLKENAAYFQFFEEAQSTEAYLKGLQDSIRKKYPCDKNMPLQHLLEQIKELEKEREKILEYKRQVQNLVNKSKKIVQLKPRNPDYRSNKPIILRALCDYKQDQKIVHKGDECILKDNNERSKWYVTGPGGVDMLVPSVGLIIPPPNPLAVDLSCKIEQYYEAILALWNQLYINMKSLVSWHYCMIDIEKIRAMTIAKLKTMRQEDYMKTIEDLELHYQDFIKNSQGSEMFGDDDKRRMQSQFTDAQKHYQTLVIQLPGHPQHQTVTKTEITHVGTCQDVNHNKVIETNRENDKQETWLLMELQKIRRQMEHCEARMTLKNLLLTDQGSTHNITVKINELKSVQNDSQALAEVLNQLKDMLANFRGSEKYCYLQNEIFGLFQKLENINGVTDGYLNSLCSVRALLQAILQTEDMLKVYEARLTEEETVCLDLDKVEAYRCGLKKIKNDLNLKKSLLATMKTELQKAQQIHSQSSQQYPLYDLDLGKFTEKVTQLTDRWQKIDKQIDFRLWDLEKQIKQLRNYRDNYQSFCKWLYDAKRRQDSLESMKFGDSNTVMRFLNEQKNLHNEISGKRDKSEEVHKIAELCANSIKDYELQLASYTSGLETLLNIPIKRTMVQSPSGAADIHARYIELLTRSGDYYRFLSEMLKSLEDLKLKNTKIEVLEEELRLARDANSENCNKNKFLDQNLQKYQAECSQFKAKLVSLEELKRQAELDGKSAKQNLDKCYGQIKELNEKITRLTYEIEDEKRRRKTVEDRFDQQKNDYDQLQKARQCEKESLGWQKLESEKAIKEKEYEIERLRVLLQEEGARKREYENELAKASNRIQESKSQCTQVVQERESLLVKIKVLEQDKARLQRLEDELNRAKATLEAETRVKQRLECEKQQIQNDLNQWKTQYSRKEETIRKIESEREKSEREKNSLRSEIERLQAEIKRIEERCRRKLEDSTRETQSQLETERCRLQKEIDKLRQRPYGSHRETQTEYEWTVDSSKLVFDGLRKKVTAMQLYECQLIDKTTLDKLLKGKKSVEEVASEIQPFLRGAGAIAGASASPKEKYSLVEAKRKKFITPESTVMLLEAQAATGGIIDPHRNEKLTVDNAIARDLIDFDDRQQIYTAEKAITGFDDPFSGKTVSVSEAIKKNLIDRETGMRLLEAQLASGGVVDPVNSVFLPKDVALARGLIDRDLYRSLNDPRDSQKNFVDPITKKKVSYMQLRERCRIEPHTGLLLLSVQKRSMSFQGIRQPVTVTELVDSGILRPSTVNELESGQISYDEVGERIKDFLQGSSCIAGIYNETTKQKLGIYEAMKIGLVRPGTALELLEAQAATGFIVDPVSNLRLPVEEAYKRGLVGIEFKEKLLSAERAVTGYNDPETGNIISLFQAMNKELIEKGHGIRLLEAQIATGGIIDPKESHRLPVDMAYKRGYFNEELSEILSDPSDDTKGFFDPNTEENLTYLQLKERCIKDEETGLCLLPLKEKKKQVQTSQKNTLRKRRVVIVDPETNKEMSVQEAYKKGLIDYETFKELCEQECEWEEITITGSDGSTRVVLVDRKTGSQYDIQDAIDKGLVDRKFFDQYRSGSLSLTQFADMISLKNGVGTSSGLSGSVNDDVFSSSRHESVSKISTISSVRNLTIRSSSLSDPLEESSPIAAIFDTENLEKISITEGIERGIVDSITGQRLLEAQACTGGIIHPTTGQKLSLQDAVSQGLIDQDMATRLKPAQKAFIGFEGVKGKKKMSAAEAVKEKWLPYEAGQRFLEFQFLTGGLVDPEVHGRISTEEAIRKGFIDGRAAQRLQDISSYAKILTCPKTKLKISYKDAMNRSMVEDITGLRLLEAASVSSKGLPSPYNMSAPGSRSGSRSGSRSGSRSGSRSGSRRGSFDATGNSSYSYSYSFSSSSIGY

SEQ ID NO: 45 - DNA, 10353 bp, Pan troglodytes
  CDS (1)..(9645)
atggagaagagaggagggcactgcagtgggagagggcaggaaccaaagcacagaggcaggaaggcacctgggattgagtattgggattcggctgtggagggagtggcctgccaggctgcggagtgtgtatcttacctgtggatagtgggagccaatgaagattcccaaactgctaagcagttaaaactcaaggagccgtcggacaggtttaacgagagtgaagtgtgccgctccacacccacctttgcaagacagaactgcttcacggttcataaacattttggaaacgcactgtatcagaagaaacagcttttcatggatggtgtgactgggtctgtatccaaacccggttcggttcctggagccaacggtgtagttaacactcagcctcttgcagttaacactcagcctcttaactgggagtggccctggagcaagtcgctggaatgttcaagctccgcgtcactcatcggtaccaactccgacgcagctcctctgcgcccttgccgccctccgagccacagctcttcctcccgctcctgcccccggcccgtcgccgtctccgcgctcgcagcggcctcgggagggcccaggtggcgagcagcgacctcgcgagccttccgcactcccgcccggttccccggccgtccgcctatccttggccccctccgctttctccgcgccggcccgcctcgcttatgcctcggcgctgagccgctctcccgattgcccgccgacatgagctgcaacggaggctcccacccgcggatcaacactctgggccgcatgatccgcgccgagtctggcccggacctgcgctacgaggtgacgagtggcggcgggggcaccagcaggatgtactactcgcggcgcggcgtgatcaccgaccagaactcggacggctactggtgggtacctgcccggagagcgcgggctgcggggctcgcgggacagggagggaccatcctcctctggacgactgggagaatcgagtcccgaagccgggcgggtggtcagagggggcgtcgggcccgcgcggggctgtcccctgcctgctggacacggctgcagccgcctttgtcccagcccgcgaatgggaggtcaggcgaggtggggctgcgaccacaaaacccaacctctccaaccgtaatcaaagtaaaagaggaaaggagcggggccccggtcctgtctggtggccgagtggtgctcggggctccgcagtctctaccggctcacccccaatccccagtaaccccgagaccacgactgcaacgactcctggactcctcggccacccaaggacgtttgtatcaaggctgcgcgtcccggcggcgcggggtcctgtcccgaggaggcgcttcggcttcccctcaaactacaaacaccatccaggagctgctgcagaactgctccgactgcttgatgcgagcagagctcatcgtgcagcctgaattgaagtatggagatggaatacaactgactcggagtcgagaattggatgagtgttttgcccaggccaacgaccaaatggaaatcctcgacagcttgatcagagagatgcggcagatgggccagccctgtgatgcttaccagaaaaggcttcttcagctccaagagcaaatgcgagccctttataaagccatcagtgtccctcgagtccgcagggccagctccaagggtggtggaggctacacttgtcagagtggctctggctgggatgagttcaccaaacatgtcaccagtgaatgtttgggatggatgaggcagcaaagggcggagatggacatggtggcctggggtgtggacctggcctcagtggagcagcacattaacagccaccggggcatccacaactccatcggcgactatcgctggcagctggacaaaatcaaagccgacctgcgtgagaaatctgcgatctaccagtggagggaggagtatgaaaacctgctgaaagcgtcctttgagaggatggatcacctgcgacagctgcagaacatcattcaggccacgtccagggagatcatgtggatcaatgactgcgaggaagaggagctgctgtacgactggagcgacaagaacaccaacatcgctcagaaacaggaggccttctccatacgcatgagtcaactggaagttaaagaaaaagagctcaataagctgaaacaagaaagtgaccaacttgtcctcaatcagcatccagcttcagacaaaattgaggcctatatggacactctgcagacgcagtggagttggattcttcagatcaccaagtgcattgatgttcatctgaaagaaaatgctgcctactttcagttttttgaagaggcgcagtcaactgaagcatacctgaaggggcttcaggactccatcaggaagaagtaccgaagcgacaagaacatgcccctgcagcacctgctggaacagatcaaggagctggagaaagaacgagagaaaatccttgaatacaagcgtcaggtgcagaacttggtaaacaagtctaagaagattgtacagctgaagcctcgtaacccagactacagaagcaataaacccattattctcagagctctctgtgactacaaacaagaccagaaaattgtgcataagggggatgagtgtatcctgaaggacaacaacgagcgcagcaagtggtacgtgacgggcccgggaggcgttgacatgctcgttccctctgtggggctgatcatccctcctccgaacccactggccctgaaaacaatgcggcaggaagattacatgaagacgatagccgaccttgagttacattaccaagagttcatcagaaatagccaaggctcagagatgtttggagatgatgacaagcggaaaatacagtctcagttcaccgatgcccagaagcattaccagaccctggtcattcagctccctggctatccccagcaccagacagtgaccacaactgaaatcactcatcatggaacctgccaagatgtcaaccataataaagtaattgaaaccaacagagaaaatgacaagcaagaaacatggatgctgatggagctgcagaagattcgcaggcagatagagcactgcgagggcaggatgactctcaaaaacctccctctagcagaccaggggtcttctcaccacatcacagtgaaaattaacgagcttaagagtgtgcagaatgattcacaagcaattgctgaggttctcaaccagcttaaagatatgcttgccaacttcagaggttctgaaaagtactgctatttacagaatgaagtatttggactatttcagaaactggaaaatatcaatggtgttacagatggctacttaaatagcttatgcacagtaagggcactgctccaggctattctccaaacagaagacatgttaaaggtttacgaagccaggctccctgaggaagaaactgtctgcctggacctggataaagcggaagcttaccgctgtggactgaagaaaataaaaaatgacttgaacttgaagaagtcgttgttggccactatgaagacagaactacagaaagcccagcagatccactctcagacttcacagcagtatccgctttatgatctggacttgggcaagttcggtgaaaaagtcacacagctgacagaccgctggcaaaggatagataaacagatcgactttagattatgggacctggagaaacaaatcaagcaattgaggaattatcgtgataactatcaggctttctgcaagtgggtctatgatgctaaacgccgccaggattccttagaatccatgaaatttggagattccaacacagtcatgcggtttttgaatgagcagaagaacttgcacagtgaaatatctggcaaacgagacaaatcagaggaagtacaaaaaattgctgaactttgcgccaattcaattaaggattatgagctccagctggcctcatacacctcaggactggaaactctgctgaacatacctatcaagaggaccatgattcagtccccttctggggtgattctgcaagaggctgcagatgttcatgctcggtacattgaactacttacaagatctggagactattacaggttcttaagtgagatgctgaagagtttggaagatctgaagctgaaaaataccaagatcgaagttttggaagaggagctcagactggcccgagatgccaactcggaaaactgtaataagaacaaattcctggatcagaacctgcagaaataccaggcagagtgttcccagttcaaagcgaagcttgcgagcctggaggagctgaagagacaggctgagctggatgggaagtcggctaagcaaaatctagacaagtgctacggccaaataaaagaactcaatgagaagatcacccgactgacttatgagattgaagatgaaaagagaagaagaaaatctgtggaagacagatttgaccaacagaagaatgactatgaccaactgcagaaagcaaggcaatgtgaaaaggagaaccttggttggcagaaattagagtctgagaaagccatcaaggagaaggagtacgagattgaaaggttgagggttctactgcaggaagaaggcacccggaagagagaatatgaaaatgagctggcaaaggtaagaaaccactataatgaggagatgagtaatttaaggaacaagtatgaaacagagattaacattacgaagaccaccatcaaggagatatccatgcaaaaagaggatgattccaaaaatcttagaaaccagcttgatagactctcaagggaaaatcgagatctgaaggatgaaattgtcaggctcaatgacagcatcttgcaggccactgagcagcgaaggcgagctgaagaaaatgcccttcagcaaaaggcctgtggctctgagataatgcagaagaagcagcatctggagatagaactgaagcaggtcatgcagcagcgctctgaggacaatgcccggcacaagcagtccctggaggaggctgccaagaccattcaggacaaaaataaggagatcgagagactcaaagctgagtttcaggaggaggccaagcgccgctgggaatatgaaaatgaactgagtaaggtaagaaacaattatgatgaggagatcattagcttaaaaaatcagtttgagaccgagatcaacatcaccaagaccaccatccaccagctcaccatgcagaaggaagaggataccagtggctaccgggctcagatagacaatctcacccgagaaaacaggagcttatctgaagaaataaagaggctgaagaacactctaacccagaccacagagaatctcaggagggtggaagaagacgtccaacagcaaaaggccactggctctgaggtgtctcagaggaaacagcagctggaggttgagctgagacaagtcactcagatgcgaacagaggagagcgtaagatataagcaatctcttgatgatgctgccaaaaccatccaggataaaaacaaggagatagaaaggttaaaacaactgatcgacaaagaaacaaatgaccggaaatgcctggaagatgaaaacgcgagattacaaagggtccagtatgacctgcagaaagcaaacagtagtgcgacggagacaataaacaaactgaaggttcaggagcaagaactgacacgcctgaggatcgactatgaaagggtttcccaggagaggactgtgaaggaccaggatatcacgcggttccagagctctctgaaagagctgcagctgcagaagcagaaggtggaagaggagctcaatcggctgaagaggacggcgtcagaagactcctgcaagaggaagaagctggaggaagagctggaaggcatgaggaggtcgctgaaggagcaagccatcaaaatcaccaacctgacccagcagctggagcaggcatccattgttaagaagaggagtgaggatgacctccggcagcagagggacgtgctggatggccacctgagggaaaagcagaggacccaggaagagctgaggaggctgtcttctgaggtcgaggccctgaggcggcagttactccaggaacaggaaagtgtcaaacaagctcacttgaggaatgagcatttccagaaggcgatagaagataaaagcagaagcttaaatgaaagcaaaatagaaattgagaggctgcagtctctcacagagaacctgaccaaggagcacttgatgttagaagaagaactgcggaacctgaggctggagtacgatgacctgaggagagggcgaagcgaagcggacagtgataaaaatgcaaccatcttggaactaaggagccagctgcagatcagcaacaaccggaccctggaactgcaggggctgattcatgatttacagagagagagggaaaatttgagacaggaaattgagaaattccaaaagcaggctttagaggcatctaataggattcaggaatcaaagaatcagtgtactcaggtggtacaggaaagagagagccttctggtgaaaatcaaagtcctggagcaagacaaggcaaggctgcagaggctggaggatgagctgaatcgtgcaaaagcaactctagaggcagaaaccagggtgaaacagcgcctggagtgtgagaaacagcaaattcagaatgacctgaatcagtggaagactcaatattcccgcaaggaggaggctattaggaagatagaatcggaaagagaaaagagtgagagagagaagaacagtcttaggagtgagatcgaaagactccaagcagagatcaagagaattgaagagaggtgcaggcgtaagctggaggattctaccagggagacacagtcacagttagaaacagaacgctcccgatatcagagggagatcgataaactcagacagcgcccatatgggtcccatcgagagacccagactgactgtgagtggaccgttgacacctccaagctggtgtttgatgggctgaggaagaaggtgacagcaatgcagctctatgagtgtcagctgatcgacaaaacaaccttggacaaactattgaaggggaagaagtcagtggaagaagttgcttctgaaatccagccattccttcggggtgcaggatctatcgctggagcatctgcttctcctaaggaaaaatactctttggtagaggccaagagaaagaaattaatcagcccagaatccacagtcatgcttctggaggcccaggcagctacaggtggtataattgatccccatcggaatgagaagctgactgtcgacagtgccatagctcgggacctcattgacttcgatgaccgtcagcagatatatgcagcagaaaaagctatcactggttttgatgatccattttcaggcaagacagtatctgtttcagaagccatcaagaaaaatttgattgatagagaaaccggaatgcgcctgctggaagcccagattgctgcagggggtgtagtagaccctgtgaacagtgtctttttgccaaaagatgtcgccttggcccgggggctgattgatagagatttgtatcgatccctgaatgatccccgagatagtcagaaaaactttgtggatccagtcaccaaaaagaaggtcagttacgtgcagctgaaggaacggtgcagaatcgaaccacatactggtctgctcttgctttcagtacagaagagaagcatgtccttccaaggaatcagacaacctgtgaccgtcactgagctagtagattctggtatattgagaccgtccactgtcaatgaactggaatctggtcagatttcttatgacgaggttggtgagagaattaaggacttcctccagggttcaagctgcatagcaggcatatacaatgagaccacaaaacagaagcttggcatttatgaggccatgaaaattggcttagtccgacctggtactgctctggagttgctggaagcccaagcagctactggctttatagtggatcctgttagcaacttgaggttaccagtggaggaagcctataagagaggtctggtgggcattgagttcaaagagaagctcctgtctgcagaacgagctgtcactgggtataatgatcctgaaacaggaaacatcatctctttgttccaagccatgaataaggaactcatcgaaaagggccatggtattcgcttattagaagcacagatcgcaaccggggggatcattgacccaaaggagagccatcgtttaccagttgacatagcatataagaggggctatttcaatgaggaactcagtgagattctctcagatccaagtgatgataccaaaggattttttgaccccaacactgaagaaaatcttacctatctgcaactaaaagaaagatgcattaaggatgaggaaacagggctctgtcttctgcctctgaaagaaaagaagaaacaggtgcagacatcacaaaagaataccctcaggaagcgtagagtggtcatagttgacccagaaaccaataaagaaatgtctgttcaggaggcctacaagaagggcctaattgattatgaaaccttcaaagaactgtgtgagcaggaatgtgaatgggaagaaataaccatcacgggatcagatggcaccaccagggtggtcctggtagatagaaagacaggcagtcagtatgatattcaagatgctattgacaagggccttgttgacaggaagttctttgatcagtaccgatccggcagcctcagcctcactcaatttgctgacatgatctccttgaaaaatggtgttggcaccagcagcagcatgggcagtggtgtcagcgatgatgtttttagcagctcccgacatgaatcagtaagtaagatttccaccatatccagcgtcaggaatttaaccataaggagcagctctttttcagacaccctggaagaatcgagccccattgcagccatctttgacacagaaaacctggagaaaatctccattacagaaggtatagagcggggcatcgttgacagcatcacgggtcagaggcttctggaggctcaggcctgcacaggtggcatcatccacccaaccacgggccagaagctgtcacttcaggacgcagtctcccagggtgtgattgaccaagacatggccaccaggctgaagcctgctcagaaagccttcataggcttcgagggtgtgaagggaaagaagaagatgtcagcagcagaggcagtgaaagaaaaatggctcccgtatgaggctggccagcgcttcctggagttccagtacctcacgggaggtcttgttgacccggaagtgcatgggaggataagcaccgaagaagccatccggaaggggttcatcgatggccgcgccgcacagaggctgcaagacaccagcagctatgccaaaatcctgacctgccccaaaaccaaattaaaaatatcctataaggatgccataaatcgctccatggtagaagatatcactgggctgcgccttctggaagctgcctccgtgtcgtccaagggcttacccagcccttacaacatgtcttccgctccgggctcccgctccggctcccgctcgggatctcgctccggatctcgctccgggtcccgcagtgggtcccggagaggaagctttgacgccacagggaattcttcctactcttattcctactcatttagcagtagttctattgggcactagtagtcagttgggagtggttgctataccttgacttcatttatatgaatttccactttattaaataataaaaaagaaaatcccggtgcttgcagtagagtgataggacattctatgcttacagaaaatatagccatgattgaaatcaaatagtaaaggctgttctggctttttatcttcttagctcatcttaaataagcagtacacttggatgcagtgcgtctgaagtgctaatcagttgtaacaatagcacaaatcgaacttaggatttgtttcttctcttctgtgtttcgatttttgatcaattctttaattttggaagcctataatacagttttctattcttggagataaaaattaaatggatcactgatattttagtcattctgcttctcatctaaatatttccatattccgtattaggagaaaattaccctcccagcaccagccccccctctcaaacccccaacccaaaaccaagcattttggaatgagtcccctttagttttagagtgtggactgtataacccatatactctttgatgtacttgtttggtttggtattaatttgactgtgcatgacagcggcaatctttgcttttctttggtcaaagttttctgtttattttgcttgtcatattcgatgtactttaagaaggtgtctttatgaagtttgctattctggcaataaacttttagacttttgaa

SEQ ID NO: 46 - protein, 3215 aa, Pan troglodytes
MEKRGGHCSGRGQEPKHRGRKAPGIEYWDSAVEGVACQAAECVSYLWIVGANEDSQTAKQLKLKEPSDRFNESEVCRSTPTFARQNCFTVHKHFGNALYQKKQLFMDGVTGSVSKPGSVPGANGVVNTQPLAVNTQPLNWEWPWSKSLECSSSASLIGTNSDAAPLRPCRPPSHSSSSRSCPRPVAVSALAAASGGPRWRAATSRAFRTPARFPGRPPILGPLRFLRAGPPRLCLGAEPLSRLPADMSCNGGSHPRINTLGRMIRAESGPDLRYEVTSGGGGTSRMYYSRRGVITDQNSDGYWWVPARRARAAGLAGQGGTILLWTTGRIESRSRAGGQRGRRARAGLSPACWTRLQPPLSQPANGRSGEVGLRPQNPTSPTVIKVKEERSGAPVLSGGRVVLGAPQSLPAHPQSPVTPRPRLQRLLDSSATQGRLYQGCASRRRGVLSRGGASASPQTTNTIQELLQNCSDCLMRAELIVQPELKYGDGIQLTRSRELDECFAQANDQMEILDSLIREMRQMGQPCDAYQKRLLQLQEQMRALYKAISVPRVRRASSKGGGGYTCQSGSGWDEFTKHVTSECLGWMRQQRAEMDMVAWGVDLASVEQHINSHRGIHNSIGDYRWQLDKIKADLREKSAIYQWREEYENLLKASFERMDHLRQLQNIIQATSREIMWINDCEEEELLYDWSDKNTNIAQKQEAFSIRMSQLEVKEKELNKLKQESDQLVLNQHPASDKIEAYMDTLQTQWSWILQITKCIDVHLKENAAYFQFFEEAQSTEAYLKGLQDSIRKKYRSDKNMPLQHLLEQIKELEKEREKILEYKRQVQNLVNKSKKIVQLKPRNPDYRSNKPIILRALCDYKQDQKIVHKGDECILKDNNERSKWYVTGPGGVDMLVPSVGLIIPPPNPLALKTMRQEDYMKTIADLELHYQEFIRNSQGSEMFGDDDKRKIQSQFTDAQKHYQTLVIQLPGYPQHQTVTTTEITHHGTCQDVNHNKVIETNRENDKQETWMLMELQKIRRQIEHCEGRMTLKNLPLADQGSSHHITVKINELKSVQNDSQAIAEVLNQLKDMLANFRGSEKYCYLQNEVFGLFQKLENINGVTDGYLNSLCTVRALLQAILQTEDMLKVYEARLPEEETVCLDLDKAEAYRCGLKKIKNDLNLKKSLLATMKTELQKAQQIHSQTSQQYPLYDLDLGKFGEKVTQLTDRWQRIDKQIDFRLWDLEKQIKQLRNYRDNYQAFCKWVYDAKRRQDSLESMKFGDSNTVMRFLNEQKNLHSEISGKRDKSEEVQKIAELCANSIKDYELQLASYTSGLETLLNIPIKRTMIQSPSGVILQEAADVHARYIELLTRSGDYYRFLSEMLKSLEDLKLKNTKIEVLEEELRLARDANSENCNKNKFLDQNLQKYQAECSQFKAKLASLEELKRQAELDGKSAKQNLDKCYGQIKELNEKITRLTYEIEDEKRRRKSVEDRFDQQKNDYDQLQKARQCEKENLGWQKLESEKAIKEKEYEIERLRVLLQEEGTRKREYENELAKVRNHYNEEMSNLRNKYETEINITKTTIKEISMQKEDDSKNLRNQLDRLSRENRDLKDEIVRLNDSILQATEQRRRAEENALQQKACGSEIMQKKQHLEIELKQVMQQRSEDNARHKQSLEEAAKTIQDKNKEIERLKAEFQEEAKRRWEYENELSKVRNNYDEEIISLKNQFETEINITKTTIHQLTMQKEEDTSGYRAQIDNLTRENRSLSEEIKRLKNTLTQTTENLRRVEEDVQQQKATGSEVSQRKQQLEVELRQVTQMRTEESVRYKQSLDDAAKTIQDKNKEIERLKQLIDKETNDRKCLEDENARLQRVQYDLQKANSSATETINKLKVQEQELTRLRIDYERVSQERTVKDQDITRFQSSLKELQLQKQKVEEELNRLKRTASEDSCKRKKLEEELEGMRRSLKEQAIKITNLTQQLEQASIVKKRSEDDLRQQRDVLDGHLREKQRTQEELRRLSSEVEALRRQLLQEQESVKQAHLRNEHFQKAIEDKSRSLNESKIEIERLQSLTENLTKEHLMLEEELRNLRLEYDDLRRGRSEADSDKNATILELRSQLQISNNRTLELQGLIHDLQRERENLRQEIEKFQKQALEASNRIQESKNQCTQVVQERESLLVKIKVLEQDKARLQRLEDELNRAKATLEAETRVKQRLECEKQQIQNDLNQWKTQYSRKEEAIRKIESEREKSEREKNSLRSEIERLQAEIKRIEERCRRKLEDSTRETQSQLETERSRYQREIDKLRQRPYGSHRETQTDCEWTVDTSKLVFDGLRKKVTAMQLYECQLIDKTTLDKLLKGKKSVEEVASEIQPFLRGAGSIAGASASPKEKYSLVEAKRKKLISPESTVMLLEAQAATGGIIDPHRNEKLTVDSAIARDLIDFDDRQQIYAAEKAITGFDDPFSGKTVSVSEAIKKNLIDRETGMRLLEAQIAAGGVVDPVNSVFLPKDVALARGLIDRDLYRSLNDPRDSQKNFVDPVTKKKVSYVQLKERCRIEPHTGLLLLSVQKRSMSFQGIRQPVTVTELVDSGILRPSTVNELESGQISYDEVGERIKDFLQGSSCIAGIYNETTKQKLGIYEAMKIGLVRPGTALELLEAQAATGFIVDPVSNLRLPVEEAYKRGLVGIEFKEKLLSAERAVTGYNDPETGNIISLFQAMNKELIEKGHGIRLLEAQIATGGIIDPKESHRLPVDIAYKRGYFNEELSEILSDPSDDTKGFFDPNTEENLTYLQLKERCIKDEETGLCLLPLKEKKKQVQTSQKNTLRKRRVVIVDPETNKEMSVQEAYKKGLIDYETFKELCEQECEWEEITITGSDGTTRVVLVDRKTGSQYDIQDAIDKGLVDRKFFDQYRSGSLSLTQFADMISLKNGVGTSSSMGSGVSDDVFSSSRHESVSKISTISSVRNLTIRSSSFSDTLEESSPIAAIFDTENLEKISITEGIERGIVDSITGQRLLEAQACTGGIIHPTTGQKLSLQDAVSQGVIDQDMATRLKPAQKAFIGFEGVKGKKKMSAAEAVKEKWLPYEAGQRFLEFQYLTGGLVDPEVHGRISTEEAIRKGFIDGRAAQRLQDTSSYAKILTCPKTKLKISYKDAINRSMVEDITGLRLLEAASVSSKGLPSPYNMSSAPGSRSGSRSGSRSGSRSGSRSGSRRGSFDATGNSSYSYSYSFSSSSIGH

SEQ ID NO: 47 - DNA, 6702 bp, Gallus gallus
  CDS (1)..(6702)
atgagcatgaacggcggctcgcacccgcggatcaacacgctgggccgcatggcgcgggccgactcgggcaccgacctgcgctacgagatgagctcccatgtggtgggcggcggcggcggcggcacccacacccacaagacctactattaccagaagacctacgggggggactacgcctccgacgggtacggtcagaatgggacctgtacagttaccagacgtcagaacaccattcaggagcttctgcaaaactgttcggattgcctgatgagagctgagctcatagtacaacctgaattgaaatatggtgatggtgtccagattagaggaaacagagatctggaagaatgttttgcgcaggcaaatgaccaaatggacatcctggatgggctgatccgagagctaaggcagatgaatcagccctgtgaaatgtatcagaaaaggctgctccaacttcaagagcaaatgcgagctctgtacaaagccattagtgttccccgtgccaggagggccagctccaaaggtggtggttgctactcctctcagagtggttcaggctgggatgagtacacaaaacgtgtgacaagtgaatgcttaaattggatgaggcaacagaaggctgaaatggagctggtgaaatgggggtttgatgcagcatctattgagcaacagattagtgaccatagaagaactcacaatgccattggagactatcgctggcacctggacaaagtcaaaacagatctgcgtgagaaggctgccgttcaccagctggaggaagaatacgaaggactgctgaaatactcctttgagagaatggatcagctccgtcaattccagaaccttatccaagcaaccagcagagagatcatgtggatcaatgactgtgaggaagaagagcttctctacgactggagcgacaggaacacagatatctccaggaagcaggaggccttctctaaacgtatgagtgaactggagcttaaagaaaaagaactcaacaagctaaagcaagaaagtgaccagcttgtgctcaaccagcaccctgcttcagacaaaattgaggcctacatggatacactacaaactcagtggagctggattcttcagatcacgaagtgcattgatgttcatttgaaagagaatgcagcttactttcagttctttgaggaggcccaagctacagagagctatctgaagaatttacaggactccatcagaaagaagttcatatgtgataagagcatgtcacttcagagcttgctggagcagatcaaagagctggagaatgaacgagagagaattcttgaatacaagaggcaagtgcagagtttggtgaataaatccaagaagattgtgcagctgaagccacgtaacccagattaccggagtaacaagcccattatcctcaaggctctatgtgactacaaacaggatctgaaaacagtgcgcaaaggagatgaatgcatcctgaaggacaacaatgagcgcagcaagtggttggtgactggccctggaggagtggatatgctggtgccatctgttagtctgatcatcccacccccaaatccattagcagtggatcttgctaccaaaattgagcaatactacgaagctattctggctttgtggaaccagctgtatatcaacatgaagagcctggtatcttggcattattgcatgattgacattgagaaaatcagagcgatgactattgctaagctgaaaacaatgcgtaaggaagattaccaaaaaataataactgacttggagatccattatcaagaattcctcaggaacagccaaggctctgagatgtttggtgatgaagacaaacgaaagatccagacgcagttcactgatgctcagaaacactaccaaaccttaataatacaactacccaatcaaccacggccaccccagacagtgattccaactgagagttgtcctgtgggtacctcaaacaccattatagttaatgagagaaaccgagaacatgataaacaggaggcttggctgctgatggaacttcagaaacttcggcgtcagattgaagcttctgagattcgaatggttcaaagagctccacttggtgtggatcaaggggctctgcatgacttttctgtcagaatacaggatttagagggtgtgcagaatgactctcaaataatggctgaaaccctcaataagcataaggacttgctgcctaacttcagaggctgtgaaaagtatgtgtacttgcaatcagagataaatgccctgtttcaaaaactggaaaacattaatggtgtttctgctggctacttagacagcttgaatgcactgaggtgtctgctccagcttattctacaaactgaagatgttatcagagtttttgaagtcagactatctgaagaagagactgttcctttggatcttgataaagtggaggcatatcgggcttgtctaaagaaaatgaaaagtgatctgaacatgaagaagtcactgttgaatacccttgaaaatgagctgcagaaaatgattcagattcactcacagtcttgccagtcatatactctgtatgatatggatgttggaaagttcactgacaaagttacccaattaatagaccgctggcagagagctgaaaagcagatagataacagatcatgggatttagaaagacagatcaaacagctgaaaacgtaccgggatctatatcaggctctgtgcaaatggatctgtgatgccaagcgcaggcaggattctattgagtccacaaagctgtgtgattccaacactattatgagatatctacatgatcagaagaacttgcacagtgaaatctgtgggaagcgagacaaagttgaagagcttctcaagcatgcagatcagtgctcagctgcaattaaggattatgagcttcaggttgcttcctacagttctggattagaaacgttgctcaacatacctatcaagaagtgtgtggttcagtctccagcagtgctgattctgcaagaggctagtgaggctcaggctcgctacatagagcttcttacaagatctggagattattacaaattcttaagtgaaatgttaaagagcatggaggacctgaagatgaaagccaccaaaattgaacttctggaagaagaactcagacttgccagggattcaaattcagaaacaaacaacaagcataaattcctggaacagaatctgcagaagtaccagatggacatttctcagctcaaagcaaagctgatgagtttggaggagatgaaaagacaggctgaaatggatggaaattctgctaagcaaaacctggacaaatgctatgcccaaataaaggatctaaatgacagaataaccaggttgacttacgagactgaagatgagaaaaggaaaaggaagttgctggaggacagatatgagcaacaaaagaatgactacgaccagctgcagaaaacaagacaaaacgagaaagacagccttggctggcagaagttagaatctgagaaggtcatcaaggagaaggagtacgagatagaaagattaagggttctcctgcaggatgaaggcacacggaagagggagtatgaaaatgagctggctaaggtaagaaaccagtttagcgaggagatgagtaatttaaagaacaagtatgaaacagaaattaatattaagaagaccacaatccagcagatagctgcacagaaagatgatgatgcaaaaggtctcagagcccaggttgacagactgtcaagagaaaacagagaccttaaggatgagattgtgaggctgaacgatgccattctgcaaaccacagatcagcggaggagggcagaagaagatgctcttcagcagaaggcttgcagttctgaggtgtcgcagcagaagcaccagttagagctggagctgaaacagatcattcagcttcgtggtgaagacaactcaagatacaagcaggctcttgaagaggctgctgctactattcaggataaaactaaggagctggaaaggctaaagcttcagcttcaggaagaagctaaaagccgatgggagcttgaaaatgagttggctaaggtaaggaacagttatgatgaggaaattattagcttaaagaacaaatatgaaacagagattaatatcacaaagaccacaattcatcaggtcactatgcaaaaggaagaggataccaataattatagaacacagcttgataatgctgtgagagaaaataggaatttgtgtgaggaaattaggagactgaagaatacaataactcaaacaacagataatctacggaaaatagaagagaatgctcagcagcaaaaggcagctggctcagagctttctcagaagaaacagcagctggagattgaactaaaacaagttattcagaggcactctgacgagagcatgcgatacaaacaatcgcttgatgatgcttctaagaccattaaagagagaaacaaagagattgaaaggctgagaaagttgttggatatccaaaaacataagctggaggaggaactttgcaggcagaataagaatgtgatggaggagacagccaggaggaagaaactggacgaggaagtagaaggcatgaggagatctctgagagagcaatcagttaaaataactaatctcacacagcagatagaggaagtgtctattgtaaagaagagaaatgaagatgaccttagacaccaaagagaagtactagatggccacgtgagagagaaacaaaggtacatggaggagataagaaaatacacctctgatcttgagactttacgtcgtcagttggtacaagaacaggagcaattaaaacaggctcacctgcgaaatgagcacttacagaaaacctctgaggagaagagcaaaaacttgaacgagtgcaaaattgaaatcgaaaggcttcagtctctcaccgagaacctaaccaaggaacacttgttactggaggaagaactgcgaaatgttagattggagtatgatgatctcaaaatggtcagaagtgaagttgatgagaaaaattctgccattgctgaactaaagaatcagcttcagacaagcagcaagcaaaccctggaacttcaggggttgattaatgatttacagaaagaaagggaaaaattgagacaggaaattgaaaaattccaaaagcaggctctggaggcatccaataggattcaagaatccaaaaatcagtataatcacattatgcaagaaagagaaaccttgctgataaaaatgagtgctctggagcaagacaaagccaggctgcagagattagaagaggagctgaaccgtttgaaagttaacctggaatcagagtctcgtttgaagcaacgcctggaaaatgagaaacaacaaattctgaatgacctcaaccaatggaagagccagcactcccggacggaggaatccataaggaagatccagtgtgagagagagaagagtgagagggagaagaacaccttgaggagtgagattgaaaggctgcagatggagattaaaaggattgaggagagataccggtgcagactggaagagactgctgtcaaaaaccagtcagagttggagtctgaacgtctcaggctgcagagagagattgagaaacttaaacaacgcccatatgggtctcacagatctactcagactgaagaagacttctgtattgatgcctccaagttgctgttcaatgggctgcggaagaaaattacagcaatgcagctatatgaatgtcagcttatagacaaactcactctggataaattgctgaaggggcagaggtcagtagaagaagttgctgctgacattgaaccctttctgaaaggggcaggtgctattgcaggagtgtctgttttacccagacagaagtactcctttgttgaggccaaacggaaccagctgcttacggcggaaaatgcagtcctgctcttggaagcccaggcagcaacaggaggagtgatagatccacaccgcaatgaggtgttaacagtggacagtgctattgccagagatctgattgactttgatgacagagaacaaatctatacagcagaaaaggctattacaggttttaaagatcctttctcaggcaaaactgtgccactatctgaagccatcaagaaaaacttggttgacagagaaattgggatgcgtctgcttgaagcccagctggctgtgggagggattgttgatcctgtcaacagtgttttcctacccaaagatgtagctttatcccgtggattgattgacaaagatctgtacaggattctaaacaactgccaaagtaccacaaagaacttcattgatcccagcaccaaaaaagcagtcacttacatgcagctaaaggaaaaatgcaggattgagccacatactggcttgctcctccttccagtgcagaagaggagtatgtcattccaagggatcaggcagcctgtctcagcagatgctcttcttgaggctggaattattaaggaatcaacaagaaatgatttggaaagaggtgcaatcacagtggaagaagtgagtgagaggattattgatttccttcagggctctagctgtattgcaggtatctacaatgaggctactaaagagaaacttggcatttaccaggctatgaaaataggcttggttagaccagagctgtcactgggtacaaagacccagaaactggaaacatcatttctctgtttcaagcaatga

SEQ ID NO: 48 - protein, 2233 aa, Gallus gallus
MSMNGGSHPRINTLGRMARADSGTDLRYEMSSHVVGGGGGGTHTHKTYYYQKTYGGDYASDGYGQNGTCTVTRRQNTIQELLQNCSDCLMRAELIVQPELKYGDGVQIRGNRDLEECFAQANDQMDILDGLIRELRQMNQPCEMYQKRLLQLQEQMRALYKAISVPRARRASSKGGGCYSSQSGSGWDEYTKRVTSECLNWMRQQKAEMELVKWGFDAASIEQQISDHRRTHNAIGDYRWHLDKVKTDLREKAAVHQLEEEYEGLLKYSFERMDQLRQFQNLIQATSREIMWINDCEEEELLYDWSDRNTDISRKQEAFSKRMSELELKEKELNKLKQESDQLVLNQHPASDKIEAYMDTLQTQWSWILQITKCIDVHLKENAAYFQFFEEAQATESYLKNLQDSIRKKFICDKSMSLQSLLEQIKELENERERILEYKRQVQSLVNKSKKIVQLKPRNPDYRSNKPIILKALCDYKQDLKTVRKGDECILKDNNERSKWLVTGPGGVDMLVPSVSLIIPPPNPLAVDLATKIEQYYEAILALWNQLYINMKSLVSWHYCMIDIEKIRAMTIAKLKTMRKEDYQKIITDLEIHYQEFLRNSQGSEMFGDEDKRKIQTQFTDAQKHYQTLIIQLPNQPRPPQTVIPTESCPVGTSNTIIVNERNREHDKQEAWLLMELQKLRRQIEASEIRMVQRAPLGVDQGALHDFSVRIQDLEGVQNDSQIMAETLNKHKDLLPNFRGCEKYVYLQSEINALFQKLENINGVSAGYLDSLNALRCLLQLILQTEDVIRVFEVRLSEEETVPLDLDKVEAYRACLKKMKSDLNMKKSLLNTLENELQKMIQIHSQSCQSYTLYDMDVGKFTDKVTQLIDRWQRAEKQIDNRSWDLERQIKQLKTYRDLYQALCKWICDAKRRQDSIESTKLCDSNTIMRYLHDQKNLHSEICGKRDKVEELLKHADQCSAAIKDYELQVASYSSGLETLLNIPIKKCVVQSPAVLILQEASEAQARYIELLTRSGDYYKFLSEMLKSMEDLKMKATKIELLEEELRLARDSNSETNNKHKFLEQNLQKYQMDISQLKAKLMSLEEMKRQAEMDGNSAKQNLDKCYAQIKDLNDRITRLTYETEDEKRKRKLLEDRYEQQKNDYDQLQKTRQNEKDSLGWQKLESEKVIKEKEYEIERLRVLLQDEGTRKREYENELAKVRNQFSEEMSNLKNKYETEINIKKTTIQQIAAQKDDDAKGLRAQVDRLSRENRDLKDEIVRLNDAILQTTDQRRRAEEDALQQKACSSEVSQQKHQLELELKQIIQLRGEDNSRYKQALEEAAATIQDKTKELERLKLQLQEEAKSRWELENELAKVRNSYDEEIISLKNKYETEINITKTTIHQVTMQKEEDTNNYRTQLDNAVRENRNLCEEIRRLKNTITQTTDNLRKIEENAQQQKAAGSELSQKKQQLEIELKQVIQRHSDESMRYKQSLDDASKTIKERNKEIERLRKLLDIQKHKLEEELCRQNKNVMEETARRKKLDEEVEGMRRSLREQSVKITNLTQQIEEVSIVKKRNEDDLRHQREVLDGHVREKQRYMEEIRKYTSDLETLRRQLVQEQEQLKQAHLRNEHLQKTSEEKSKNLNECKIEIERLQSLTENLTKEHLLLEEELRNVRLEYDDLKMVRSEVDEKNSAIAELKNQLQTSSKQTLELQGLINDLQKEREKLRQEIEKFQKQALEASNRIQESKNQYNHIMQERETLLIKMSALEQDKARLQRLEEELNRLKVNLESESRLKQRLENEKQQILNDLNQWKSQHSRTEESIRKIQCEREKSEREKNTLRSEIERLQMEIKRIEERYRCRLEETAVKNQSELESERLRLQREIEKLKQRPYGSHRSTQTEEDFCIDASKLLFNGLRKKITAMQLYECQLIDKLTLDKLLKGQRSVEEVAADIEPFLKGAGAIAGVSVLPRQKYSFVEAKRNQLLTAENAVLLLEAQAATGGVIDPHRNEVLTVDSAIARDLIDFDDREQIYTAEKAITGFKDPFSGKTVPLSEAIKKNLVDREIGMRLLEAQLAVGGIVDPVNSVFLPKDVALSRGLIDKDLYRILNNCQSTTKNFIDPSTKKAVTYMQLKEKCRIEPHTGLLLLPVQKRSMSFQGIRQPVSADALLEAGIIKESTRNDLERGAITVEEVSERIIDFLQGSSCIAGIYNEATKEKLGIYQAMKIGLVRPELSLGTKTQKLETSFLCFKQ

SEQ ID NO: 49 - DNA, 2235 bp, Homo sapiens
  CDS (1)..(2235)
atggaggtgatgaacctgatggagcagcctatcaaggtgactgagtggcagcagacatacacctacgactcgggtatccactcgggcgccaacacctgcgtgccctccgtcagcagcaagggcatcatggaggaggatgaggcctgcgggcgccagtacacgctcaagaaaaccaccacttacacccagggggtgccccccagccaaggtgacctggagtaccagatgtccacaacagccagggccaaacgggtgcgggaggccatgtgccctggtgtgtcaggcgaggacagctcgcttctgctggccacccaggtggaggggcaggccaccaacctgcagcgactggccgagccgtcccagctgctcaagtcggccattgtgcatctcatcaactaccaggacgatgccgagctggccactcgcgccctgcccgagctcaccaaactgctcaacgacgaggacccggtggtggtgaccaaggcggccatgattgtgaaccagctgtcgaagaaggaggcgtcgcggcgggccctgatgggctcgccccagctggtggccgctgtcgtgcgtaccatgcagaataccagcgacctggacacagcccgctgcaccaccagcatcctgcacaacctctcccaccaccgggaggggctgctcgccatcttcaagtcgggtggcatccctgctctggtccgcatgctcagctcccctgtggagtcggtcctgttctatgccatcaccacgctgcacaacctgctcctgtaccaggagggcgccaagatggccgtgcgcctggccgacgggctgcaaaagatggtgcccctgctcaacaagaacaaccccaagttcctggccatcaccaccgactgcctgcagctcctggcctacggcaaccaggagagcaagctgatcatcctggccaatggtgggccccaggccctcgtgcagatcatgcgtaactacagttatgaaaagctgctctggaccaccagtcgtgtgctcaaggtgctatccgtgtgtcccagcaataagcctgccattgtggaggctggtgggatgcaggccctgggcaagcacctgaccagcaacagcccccgcctggtgcagaactgcctgtggaccctgcgcaacctctcagatgtggccaccaagcaggagggcctggagagtgtgctgaagattctggtgaatcagctgagtgtggatgacgtcaacgtcctcacctgtgccacgggcacactctccaacctgacatgcaacaacagcaagaacaagacgctggtgacacagaacagcggtgtggaggctctcatccatgccatcctgcgtgctggtgacaaggacgacatcacggagcctgccgtctgcgctctgcgccacctcactagccgccaccctgaggccgagatggcccagaactctgtgcgtctcaactatggcatcccagccatcgtgaagctgctcaaccagcccaaccagtggccactggtcaaggcaaccatcggcttgatcaggaatctggccctgtgcccagccaaccatgccccgctgcaggaggcagcggtcatcccccgcctcgtccaactgctggtgaaggcccaccaggatgcccagcgccacgtagctgcaggcacacagcagccctacacggatggtgtgaggatggaggagattgtggagggctgcaccggagcactgcacatcctcgcccgggaccccatgaaccgcatggagatcttccggctcaacaccattcccctgtttgtgcagctcctgtactcgtcggtggagaacatccagcgcgtggctgccggggtgctgtgtgagctggcccaggacaaggaggcggccgacgccattgatgcagagggggcctcggccccactcatggagttgctgcactcccgcaacgagggcactgccacctacgctgctgccgtcctgttccgcatctccgaggacaagaacccagactaccggaagcgcgtgtccgtggagctcaccaactccctcttcaagcatgacccggctgcctgggaggctgcccagagcatgattcccatcaatgagccctatggagatgacatggatgccacctaccgccccatgtactccagcgatgtgccccttgacccgctggagatgcacatggacatggatggagactaccccatcgacacctacagcgacggcctcaggcccccgtaccccactgcagaccacatgctggcc

SEQ ID NO: 50 - protein, 745 aa, Homo sapiens
MEVMNLMEQPIKVTEWQQTYTYDSGIHSGANTCVPSVSSKGIMEEDEACGRQYTLKKTTTYTQGVPPSQGDLEYQMSTTARAKRVREAMCPGVSGEDSSLLLATQVEGQATNLQRLAEPSQLLKSAIVHLINYQDDAELATRALPELTKLLNDEDPVVVTKAAMIVNQLSKKEASRRALMGSPQLVAAVVRTMQNTSDLDTARCTTSILHNLSHHREGLLAIFKSGGIPALVRMLSSPVESVLFYAITTLHNLLLYQEGAKMAVRLADGLQKMVPLLNKNNPKFLAITTDCLQLLAYGNQESKLIILANGGPQALVQIMRNYSYEKLLWTTSRVLKVLSVCPSNKPAIVEAGGMQALGKHLTSNSPRLVQNCLWTLRNLSDVATKQEGLESVLKILVNQLSVDDVNVLTCATGTLSNLTCNNSKNKTLVTQNSGVEALIHAILRAGDKDDITEPAVCALRHLTSRHPEAEMAQNSVRLNYGIPAIVKLLNQPNQWPLVKATIGLIRNLALCPANHAPLQEAAVIPRLVQLLVKAHQDAQRHVAAGTQQPYTDGVRMEEIVEGCTGALHILARDPMNRMEIFRLNTIPLFVQLLYSSVENIQRVAAGVLCELAQDKEAADAIDAEGASAPLMELLHSRNEGTATYAAAVLFRISEDKNPDYRKRVSVELTNSLFKHDPAAWEAAQSMIPINEPYGDDMDATYRPMYSSDVPLDPLEMHMDMDGDYPIDTYSDGLRPPYPTADHMLA

SEQ ID NO: 51 - DNA, 3226 bp, Mus musculus
  CDS (113)..(2347)
ggagcagccgccgcccgagtgcgccgagctcagttcgctgcccgcgccggctccctcccggccagacccgaccccgattcggctcagcccggctccacgctcagcagccaccatggaggtgatgaaccttattgagcagcccatcaaggtgacagagtggcaacagacatacacctacgactcgggcatccactccggcgtcaatacctgtgtgccctctgtaagcagcaagggcatcatggatgaggatgatgcctgcggcagacagtacacactcaagaagactaccacctatacacaaggggtgccacagaaccaaggtgacctggaataccagatgtccacaacggccagagccaagcgggtgcgggaggccatgtgtccaggggtctcaggcgaggacagttctctactgctggccacccaggtggaggggcagacaaccaatctgcagcgcctggccgaaccatcccagttgctcaagtcggccatcgtccatctcatcaactaccaggatgatgcagagctggccacccgggctctgcctgagctcaccaagctgctcaacgatgaggacccggtagtggtgaccaaggcggctatgatcgtgaaccagctgtccaagaaggaggcatcccgccgggctctaatgggctcgccccagctggtggcggcggtggtgcggactatgcagaacaccagtgacctggatactgcccggtgtaccaccagcatcctgcacaacctctctcaccaccgagagggcttgctcgccatattcaagtctggaggcatccctgccctagtccgaatgctcagttcccccgtagaatctgtcctgttctacgccatcaccacactgcacaacctgctgctctatcaggagggcgccaagatggcggtgcgtctggcagacgggctgcagaagatggtgcccctactcaacaagaacaaccctaagttcctggccatcactactgactgcctgcagctcctggcctatggcaaccaggagagcaagctgatcatcctggccaatgggggaccccaagggcttgtgcagatcatgaggaactacagctacgagaagcttctgtggaccaccagccgtgtgctcaaggtgctctccgtgtgtcctagcaacaagcccgccatcgtggaggctggtgggatgcaggctctgggcaagcacttgacaagcaacagtccccgcctggtgcagaactgcctgtggactctgcgcaatctctcggatgtagccaccaagcaggagggcctggagagtgtgctgaagatcctggtcaaccaactgagtgtagatgacgtcaacgtcctcacctgtgccacgggcaccctctccaacctgacctgcaacaacagcaaaaacaagacgctggtgacacagaacagtggcgtggaggcgctcatccacgccatcctgagagccggagacaaagatgacatcacagagcccgctgtctgtgccctgcgccaccttaccagccgtcaccccgaggctgagatggcccagaactctgtgcgcctcaactatggaatcccggccattgtgaaactgctcaaccagccaaaccagtggccactggtcaaggcaactattggcctgatccggaacctggctctgtgcccagccaaccatgcccctctgcaggaggccgcggtcattccccgcctcgtccagctgttggtcaaggcccaccaggacgcccagcgccatgtggctgcaggcacccagcagccctacacggatggtgtgaggatggaggagatcgtggaaggctgcaccggagccctgcacatcctcgcccgggatcccatgaaccgcatggagatcttccggctcaacaccattcccctgtttgtccagctcctgtactcctctgtggagaacatccagcgtgtggctgcgggagtgctctgcgagctggcccaggacaaggaggctgccgacgccattgatgcggagggcgcctctgcccctctcatggagctactccattcccgcaatgagggcaccgcgacctacgctgctgctgtcctgttccgcatctctgaggacaagaacccagattaccgtaagcgagtgtctgtggagctcaccaattccctcttcaagcatgacccagctgcctgggaggctgcccagagtatgatcccgatcaacgaaccctatgcagacgacatggatgccacctaccgccccatgtactccagcgatgtgcctctggaccctctggacatgcacatggacctggatggagactaccccatggacacctacagtgacggcctgaggcctccctaccccactgcagaccacatgctggcctagccagctccacctcagcgctgtttctcacctggaaagctctcaagagcagactgtgggaggagacagaaaagtacctgagccccgggggccggcctggacttcctgctgaacacgcgtgctcccgtgctccagagagttcctccatagggattttgggatggtgtctgttcctgcttttctgtcctgggctggggatccaggctcagcactttctccccgtccccactatggctatggccactaaagctttagactcagcctgtgtccctgcacagcaattctctctgctgactccagctgcctggacccccacccccacccccacccaggccttcctttgttttttttcgggggccagttttctcacttgacctcctgggatatccaagacacaggttcaaggccccaacccctgacacccaaagcttcttttgaaaagttcagggaccttcttgggggtcggtggggagagcggagacattaagtgcccctgccaggacctgcccttcccttcaggatgctaagtttttgctttgaccctcccaaggggggagctcttggtgacgctccctccctctcacatcactccacactggcccatctgctctgcagaagcgttctggctcacccctctggtgtgtggtgaggggctttcttctccccctcctgtttgactcccaccacctcctgcacatgggtttgggggcgggggtgggggactgaaagggaagtcccctcagagagtcttattatcaacactttattttttggttattggcttttcttttctttttttgtttttgtatagaccaaagcaaagaaaataaaataacacagagatccaaaaaaaaaaaaaaaaaaaaaaaaaaaaaaaaa

SEQ ID NO: 52 - protein, 745 aa, Mus musculus
MEVMNLIEQPIKVTEWQQTYTYDSGIHSGVNTCVPSVSSKGIMDEDDACGRQYTLKKTTTYTQGVPQNQGDLEYQMSTTARAKRVREAMCPGVSGEDSSLLLATQVEGQTTNLQRLAEPSQLLKSAIVHLINYQDDAELATRALPELTKLLNDEDPVVVTKAAMIVNQLSKKEASRRALMGSPQLVAAVVRTMQNTSDLDTARCTTSILHNLSHHREGLLAIFKSGGIPALVRMLSSPVESVLFYAITTLHNLLLYQEGAKMAVRLADGLQKMVPLLNKNNPKFLAITTDCLQLLAYGNQESKLIILANGGPQGLVQIMRNYSYEKLLWTTSRVLKVLSVCPSNKPAIVEAGGMQALGKHLTSNSPRLVQNCLWTLRNLSDVATKQEGLESVLKILVNQLSVDDVNVLTCATGTLSNLTCNNSKNKTLVTQNSGVEALIHAILRAGDKDDITEPAVCALRHLTSRHPEAEMAQNSVRLNYGIPAIVKLLNQPNQWPLVKATIGLIRNLALCPANHAPLQEAAVIPRLVQLLVKAHQDAQRHVAAGTQQPYTDGVRMEEIVEGCTGALHILARDPMNRMEIFRLNTIPLFVQLLYSSVENIQRVAAGVLCELAQDKEAADAIDAEGASAPLMELLHSRNEGTATYAAAVLFRISEDKNPDYRKRVSVELTNSLFKHDPAAWEAAQSMIPINEPYADDMDATYRPMYSSDVPLDPLDMHMDLDGDYPMDTYSDGLRPPYPTADHMLA

SEQ ID NO: 53 - DNA, 2235 bp, Rattus norvegicus
  CDS (1)..(2235)
atggaggtgatgaaccttattgaacagcccatcaaggtgacggagtggcagcagacgtacacctatgactcgggcatccactccggtgtcaatacctgtgtgccctctgtcagcagcaagggcctcctcgatgaggatgacacctgcggcagacagtacacactcaagaaaactaccacctacacacaaggggtgccacagagccaaggcgacctggagtaccagatgtccaccacggccagagccaagcgggtgcgggaggccatgtgcccaggtgtctcaggcgaggacagttctctcctcctggccacccaggtggaggggcagacgaccaacctgcagcgactggccgaaccatcccagctactcaagtcggccattgtacatctcatcaactaccaggacgacgcagagctggccacccgggctctgcctgagctcaccaagctgctcaacgatgaggacccggtagtggtcaccaaggcggctatgatcgtgaaccagctgtccaagaaggaggcatcccgccgtgccctgatgggctcgccccagctggtggcggctgtggtgcggaccatgcagaacaccagtgacctggatactgcccgctgtaccaccagcatcctgcacaacctctcccaccaccgagaggggctgcttgctatcttcaagtctggaggcatccccgccctggtccgaatgctcagttcccccgtagagtctgtcctgttctacgccatcaccacactgcacaacctgctgctctaccaggagggcgccaagatggcggtgcgtctggcagacggactgcagaagatggtgcccctacttaacaagaacaaccccaaattcctggccatcaccaccgactgcctgcagctcctggcctatggcaaccaggagagcaagctgatcatcctggccaatgggggaccccagggtcttgtgcagatcatgaggaactacagctacgagaagcttctgtggaccaccagccgggtgctcaaggtgctctccgtgtgccccagcaacaagcctgccatcgtggaggctggtgggatgcaggctctaggcaagcacttgacaagcaacagcccccgcctggtgcagaactgcctgtggactctgcgcaatctctcggatgtggccaccaagcaggagggcctggagaacgtgctgaagatcctggtcaatcagctgagcgtggatgatgtcaacgtcctcacctgtgccacgggcaccctctccaacctgacctgcaacaacagcaaaaacaagacgctggtgacgcagaacagtggcgtggaggcgctcatccacgccatcctcagagccggagacaaggacgacatcacagagcccgccgtttgcgccctgcgccaccttaccagccgccaccctgaggctgagatggcccagaactctgtgcgcctcaactatggaatcccggccattgtgaaactgctcaaccagccgaaccagtggccactggtcaaggcaactatcggcctgatccggaacctggctctgtgccccgccaatcatgccccgctgcaggaggccgcggtcattccccgcctcgttcagctgctggtcaaggcccaccaggatgcccagcgacatgtagctgcgggcacccagcagccctacacggatggtgtgaggatggaggagatcgtggagggctgcaccggagccctgcacatcctcgcccgagatcccatgaaccgcatggagatcttccggctcaacaccattcccctgtttgtccagctcctgtattcctctgtggagaacatccagcgtgtggctgccggagtgctgtgcgagctggcccaggacaaggaggctgccgatgccatagacgcggagggcgcctctgcccctctcatggaactgctccactcccgcaatgaggggaccgcgacctacgctgctgctgtcctgttccgcatctccgaggacaagaacccagattaccgtaagcgagtgtctgtggaactcaccaactcgctcttcaagcatgacccagctgcctgggaggctgcccagagcatgatcccgatcaacgaaccctatgcagacgacatggatgcaacctaccgccccatgtactccagcgatgtgcctctggaccccctggatatgcacatggacatggatggcgactaccccatggacacctacagcgacggcctgagacctccctaccccgctgcagaccacatgctggcc

SEQ ID NO: 54 - protein, 745 aa, Rattus norvegicus
MEVMNLIEQPIKVTEWQQTYTYDSGIHSGVNTCVPSVSSKGLLDEDDTCGRQYTLKKTTTYTQGVPQSQGDLEYQMSTTARAKRVREAMCPGVSGEDSSLLLATQVEGQTTNLQRLAEPSQLLKSAIVHLINYQDDAELATRALPELTKLLNDEDPVVVTKAAMIVNQLSKKEASRRALMGSPQLVAAVVRTMQNTSDLDTARCTTSILHNLSHHREGLLAIFKSGGIPALVRMLSSPVESVLFYAITTLHNLLLYQEGAKMAVRLADGLQKMVPLLNKNNPKFLAITTDCLQLLAYGNQESKLIILANGGPQGLVQIMRNYSYEKLLWTTSRVLKVLSVCPSNKPAIVEAGGMQALGKHLTSNSPRLVQNCLWTLRNLSDVATKQEGLENVLKILVNQLSVDDVNVLTCATGTLSNLTCNNSKNKTLVTQNSGVEALIHAILRAGDKDDITEPAVCALRHLTSRHPEAEMAQNSVRLNYGIPAIVKLLNQPNQWPLVKATIGLIRNLALCPANHAPLQEAAVIPRLVQLLVKAHQDAQRHVAAGTQQPYTDGVRMEEIVEGCTGALHILARDPMNRMEIFRLNTIPLFVQLLYSSVENIQRVAAGVLCELAQDKEAADAIDAEGASAPLMELLHSRNEGTATYAAAVLFRISEDKNPDYRKRVSVELTNSLFKHDPAAWEAAQSMIPINEPYADDMDATYRPMYSSDVPLDPLDMHMDMDGDYPMDTYSDGLRPPYPAADHMLA

SEQ ID NO: 55 - DNA, 2187 bp, Danio rerio
  CDS (1)..(2187)
atggaaatgcacatgggagaggctccaggttcggtgaaggtcacagagtggcagcagtcgtactacggcacagattcaggcatccattcaggagccactactgttcgctcagatgatgatggaacagagtacagctctaagaaattcacctacaccaccacattcacagagaaccctgcagaggtggagtctcagttaaacatgactcgtgctcagcgtgtgagggcggccatgtttcctgagactgtgatggagggatcggtcattcattctacacagatcgatccatcccagcagaccaatgtacaaaagctggccgaaccatctcagcagctcaaagctgccatcgttcacctcatcaactaccaggacgacgctgaactcgccacacgcgccatcccagagctcaccaaactcctcaacgatgaagaccagttggttgtgaacaaagccgctatgatcgtgaaccaactgacccgcaaggaggcatcccgcagggctcttatgcagtccccgcagatggtggccgctgtagtgagagccatgcagaacacgaccgacatggagacgacccgcgccacagccagcatcctgcacaacctctcgcaccagcgtgaaggactgctcgccatcttcaaatcaggcggcattccagctctggtgcgcatgctgagctctccgatggactctgtacttttctacgccatcaccaccctgcacaacctgcttttgcaccaagagggagccaagatggcggtgcgtctggctgatggtctccagaggatggttcccctgctgaagaaaagcaaccccaaattcctggccatcaccacagactgcttgcagctgctgtcctatggcaaccaggagagcaagctgattatcctggctaatggtggtcctgagggtcttgtcaacatcatgaggacttacaactatgagaagctgctgtggaccaccagtcgtgtgctgaaagtgctctctgtctgtccaagcaacaagcctgccatcgtagatgctggtggaatgcaagctcttggtaaacatctgtccggctcaagtcagcgtctgatgcaaaactgcttgtggactttgagaaacttgtcagatgctgcaaccaaacaggacggtatggagaatcttcttcaagtcttggtcggtctgctgtctgctgatgacatcaacatgctgacatgtgccacaggcgtcctgtccaacctcacctgcaacaacacacgcaacaaaacgcaggtgacccagagtaacggcgtggaggctctcattcacaccatcctgagggccagttcaaaacaggacgtgatcgagccagccgtctgcgccctgcgccacctcaccagccgacacccagaggctgagactgcacagaacgccgtacgaatgcattacggcatccctgctattgtcaaactgctcaatcaaccctaccactggccagttgtcaaggctgtggttggtctgatccgtaacctggccctgtgtccagccaatcaggctcctttgagggacgctgacgccattcccaaactggtcactttgctttcaaaagctcatcaggatgcacagaaacccggttcatctgctcaacgatcataccaggatggggtaagaatggaggagattgttgagggctgcactggtgctcttcatatcatggccagagatcctatgaaccgaggcaccattgccagcatggacaccattcctctgtttgttcagctgttgtattctccactggataacgtcaagcgtgtggcagctggtgttctgtgtgaactggctcttgataaacagtcggctgagatcatcgatgcggaaggagccagtgctcctctcatggagctccttcactccagcaacgaagggatcgccacctatgctgctgctgttctctacagaactgctgaggacaaaaacccagactataagaaaagagtttcagtagaactcacacactcactcttcaaacacgaccctgaggcttgggaaatggcacacaacactgtgatggatcccgtccttggcgatgaagagcttgatggctacggtcctgcaggatacggtggatatgctgatggcatgcatatggatcctctagatccagaaatgcaagacgattttaggagcggcatgccctacaactccatggccagagtctaccatgattac

SEQ ID NO: 56 - protein, 729 aa, Danio rerio
MEMHMGEAPGSVKVTEWQQSYYGTDSGIHSGATTVRSDDDGTEYSSKKFTYTTTFTENPAEVESQLNMTRAQRVRAAMFPETVMEGSVIHSTQIDPSQQTNVQKLAEPSQQLKAAIVHLINYQDDAELATRAIPELTKLLNDEDQLVVNKAAMIVNQLTRKEASRRALMQSPQMVAAVVRAMQNTTDMETTRATASILHNLSHQREGLLAIFKSGGIPALVRMLSSPMDSVLFYAITTLHNLLLHQEGAKMAVRLADGLQRMVPLLKKSNPKFLAITTDCLQLLSYGNQESKLIILANGGPEGLVNIMRTYNYEKLLWTTSRVLKVLSVCPSNKPAIVDAGGMQALGKHLSGSSQRLMQNCLWTLRNLSDAATKQDGMENLLQVLVGLLSADDINMLTCATGVLSNLTCNNTRNKTQVTQSNGVEALIHTILRASSKQDVIEPAVCALRHLTSRHPEAETAQNAVRMHYGIPAIVKLLNQPYHWPVVKAVVGLIRNLALCPANQAPLRDADAIPKLVTLLSKAHQDAQKPGSSAQRSYQDGVRMEEIVEGCTGALHIMARDPMNRGTIASMDTIPLFVQLLYSPLDNVKRVAAGVLCELALDKQSAEIIDAEGASAPLMELLHSSNEGIATYAAAVLYRTAEDKNPDYKKRVSVELTHSLFKHDPEAWEMAHNTVMDPVLGDEELDGYGPAGYGGYADGMHMDPLDPEMQDDFRSGMPYNSMARVYHDY

SEQ ID NO: 57 - DNA, 2211 bp, Xenopus tropicalis
  CDS (1)..(2211)
atggatttggtggatgtagtggaagtgccaataaaagtcacagagtggcagaaaacctacacttacgactcgggcatcaattctggaataaacacagcgtctccatcgttaaacgggaaaatggtcatcgaggacgacagccatgcctaccccggcagttacactgttaaaaccacgacgtacacacagcagcagaccccagacatggacgcccagataaacatgactcgagcccagcgcgtccgagcagcaatgtacccagagacggtggaagatcactcgtaccttctgactacccagatagaagggcagcaaaccaacgtgcagaaactggcggaaccctcccaaatgttgaaatctgctatcatccaccttatcaactaccaggatgatgctgagcttgccacccgcgccattccggaactgacaaagctacttaatgatgaggatccgatggtggtgaacaaggcttccatgattgtaaaccagctgtccaagaaagaggcatcccgcaaagccctgatgcagtccccgcagattgttgccgctgtagttcgcaccatgcagcacacaagtgacatggacaccgctcgctgtaccaccagcatcctgcacaacctgtcccatcaccgcgaggggcttctgtctatcttcaaatccggcggcatccctgcacttgtgcgcatgctcagttctccagtagaatccgtgttattctatgccatcaccaccttgcacaacctgctgctctaccaggaaggggcaaagatggcagtgcgtctggcagatggtctccagaagatggtgcctttgcttaataagaataaccccaaattcttggccatcactacagactgccttcagctcttggcctatggaaatcaggagagcaagctaattatattggccaatggaggacctcaagggttggttcagatcatgaggaactacaattacgagaagcttctgtggaccacaagccgggtgctaaaagtattgtctgtgtgtcccagcaataaaccagccattgtggaagccggtggaatgcaagcactggggaaacatctgaccagcaacagcccaagacttgtacagaactgcctgtggacattaaggaatctctctgatgtggccactaaacaggagggcctggataacgttctaaagatcctggtgaaccagctgagttctgatgatgtaaacgtcctcacctgtgccactggcacattgtccaacctcacctgcaacaacggtcgcaacaagactctcgtgacgcagagcaacggggttgagtctctgattcacaccatccttcgtgcgagtgacaaggatgacattgcagagcctgctgtctgtgccctgcgtcacctgaccagtcgccaccaagacgcagaggtggctcagaattcagtgcgactgcactacggcatccctgccattgtgaaacttctcaacccaccataccagtggccactggtcaaggcaaccatcggcttgatccggaacctggccctttgtccagccaatcatgctcccttatacgatgcaggtgtcattcccaggctagtccagctgctggttaaagctcaccaagatgcacagaggcatgcagcttccggggcacagcaaccctacacggatggagtgaagatggaagagattgtggaaggttgcactggggctctgcatattcttgccagggatcctgtgaaccgtatggacatctacaagctaaacaccatcccgctgtttgtacagctcctgtattcccctgtggagaacattcagagagtggccgcgggcgtgctgtgtgagttggctcaggataaagaagcggcagacaccattgatgcagagggagcctcagccccactcatggaattgctgcactcccgcaatgaaggcatagccacatatgctgctgctgttctattccgcatatccgaggacaaaaacgcagattataggaagcgcgtgtccgtggagctcactaatgccatcttccgacaggatcctgccgcctgggaagcagcgcagagcatgattcctcttaatgatccttatccagatgaaatggaaaattatcgagctatgtaccctgaagatattccattagaaccaatgggaggagatatggatgtggagtatgcaatggatggctacagtgaccacccagtcagggggggctactctgataaccacatgatggca

SEQ ID NO: 58 - protein, 737 aa, Xenopus tropicalis
MDLVDVVEVPIKVTEWQKTYTYDSGINSGINTASPSLNGKMVIEDDSHAYPGSYTVKTTTYTQQQTPDMDAQINMTRAQRVRAAMYPETVEDHSYLLTTQIEGQQTNVQKLAEPSQMLKSAIIHLINYQDDAELATRAIPELTKLLNDEDPMVVNKASMIVNQLSKKEASRKALMQSPQIVAAVVRTMQHTSDMDTARCTTSILHNLSHHREGLLSIFKSGGIPALVRMLSSPVESVLFYAITTLHNLLLYQEGAKMAVRLADGLQKMVPLLNKNNPKFLAITTDCLQLLAYGNQESKLIILANGGPQGLVQIMRNYNYEKLLWTTSRVLKVLSVCPSNKPAIVEAGGMQALGKHLTSNSPRLVQNCLWTLRNLSDVATKQEGLDNVLKILVNQLSSDDVNVLTCATGTLSNLTCNNGRNKTLVTQSNGVESLIHTILRASDKDDIAEPAVCALRHLTSRHQDAEVAQNSVRLHYGIPAIVKLLNPPYQWPLVKATIGLIRNLALCPANHAPLYDAGVIPRLVQLLVKAHQDAQRHAASGAQQPYTDGVKMEEIVEGCTGALHILARDPVNRMDIYKLNTIPLFVQLLYSPVENIQRVAAGVLCELAQDKEAADTIDAEGASAPLMELLHSRNEGIATYAAAVLFRISEDKNADYRKRVSVELTNAIFRQDPAAWEAAQSMIPLNDPYPDEMENYRAMYPEDIPLEPMGGDMDVEYAMDGYSDHPVRGGYSDNHMMA

SEQ ID NO: 59 - DNA, 2232 bp, Canis familiaris
  CDS (1)..(2232)
atggaagtgatgaacctgattgaacaacccatcaaagtgactgagtggcaacagacatacacctatgactctggcattcactcgggtgccaacacctgtgtgccctcggtcagcagcaagggcatcatggaagaggatgaggcctgcgggcgtcagtacacgctcaagaagaccaccacctatacccaggtgccccagagccaaggtgacctggagtaccaaatgtccacgacagccagagccaagcgggtacgggaggccatgtgtcctggcgtgacaggcgaagacagctcgctgctactggccacccaggtggaagggcagaccaccaacctgcagcggctggccgagccgtcccagctgctcaagtcagccatcgtacatctcatcaactaccaggacgacgccgagctggccacccgggccctgcctgaactcaccaaactgctcaacgacgaggacccggtggtggtgaccaaggcagccatgatcgtgaaccagctgtccaagaaagaggcgtcacggcgggcgctgatgggctcgccccagctggtggcagccgtggtgcgtactatgcagaacaccagtgacctggacacagcccgctgcaccaccagcatcctgcacaacctctcccaccaccgcgaggggctgcttgccatcttcaagtcgggcggcatccctgccctggtccgcatgctcagctccccggtggagtcagtcctgttttacgccatcaccacgctgcacaacctgctgctgtaccaggagggcgccaagatggcggtgcgcctggcagatgggctgcagaagatggtgcccctgctcaacaaaaacaaccccaagttcctggccatcaccaccgactgcctgcagctcctggcttatggcaaccaggagagcaagctcatcatcttggccaatggaggaccccaggcccttgtgcagatcatgcgcaactacagctatgagaagctgctctggaccaccagccgtgtgctcaaggtgctgtctgtgtgtcccagcaataagcctgccatcgtggaggctggtgggatgcaggccttgggcaaacacctgacaagcaacagcccccgccttgtacagaactgtctctggaccttgcgcaacctctcggatgtggccaccaaacaggagggcctggagagcgtcctgaagatcctggtgaaccagctgagtgtggacgacgtcaatgtcctcacctgtgccacgggcactctgtccaacctgacgtgcaacaacagcaagaataagacgctggtgacccagaacagcggcgtggaggctctcatccatgccatcctgcgggctggcgacaaggatgacatcacggagcccgccgtctgcgccctgcgccacctcaccagccgccacccggaggccgagatggcccagaactccgtgcgcctcaactacggcatcccggccattgtcaagcttctcaaccagcccaaccagtggccgctggtcaaggcaaccatcggcctgatcaggaatctggctctgtgcccagcaaaccatgccccactgcaggaggcagcagttattccccgccttgtccagttgctggtcaaggctcaccaggatgcccagcgtcatgtggctgcaggcacacagcagccctacacggacggtgtgaggatggaggagattgtggagggctgcactggagccctgcacatcctcgcccgggatcccatgaaccgcatggagatcttccgactcaacactatacccctgtttgtacagctcctgtactcgtcagtggagaacatccagcgcgtggctgccggggtgctgtgtgagctggcccaggacaaggaggcagctgatgcaattgatgctgagggggcctcagctccactcatggagctactgcactcccgcaatgagggcaccgccacctacgctgcggctgtcctgttccgcatctccgaggacaagaacccagattaccgtaaacgcgtatctgtggagctcaccaactccctcttcaagcatgacccagctgcatgggaggctgcccagagcatgatccccatcaatgagccctacgcagatgacatggacgccacctaccgccccatgtactcgagtgatgtgcccctggaccccctggacatgcacatggacatggacgcggactatcccatcgacacttacagcgacggcctgaggcccccctaccccacggcggaccatatgctggcc

SEQ ID NO: 60 - protein, 744 aa, Canis familiaris
MEVMNLIEQPIKVTEWQQTYTYDSGIHSGANTCVPSVSSKGIMEEDEACGRQYTLKKTTTYTQVPQSQGDLEYQMSTTARAKRVREAMCPGVTGEDSSLLLATQVEGQTTNLQRLAEPSQLLKSAIVHLINYQDDAELATRALPELTKLLNDEDPVVVTKAAMIVNQLSKKEASRRALMGSPQLVAAVVRTMQNTSDLDTARCTTSILHNLSHHREGLLAIFKSGGIPALVRMLSSPVESVLFYAITTLHNLLLYQEGAKMAVRLADGLQKMVPLLNKNNPKFLAITTDCLQLLAYGNQESKLIILANGGPQALVQIMRNYSYEKLLWTTSRVLKVLSVCPSNKPAIVEAGGMQALGKHLTSNSPRLVQNCLWTLRNLSDVATKQEGLESVLKILVNQLSVDDVNVLTCATGTLSNLTCNNSKNKTLVTQNSGVEALIHAILRAGDKDDITEPAVCALRHLTSRHPEAEMAQNSVRLNYGIPAIVKLLNQPNQWPLVKATIGLIRNLALCPANHAPLQEAAVIPRLVQLLVKAHQDAQRHVAAGTQQPYTDGVRMEEIVEGCTGALHILARDPMNRMEIFRLNTIPLFVQLLYSSVENIQRVAAGVLCELAQDKEAADAIDAEGASAPLMELLHSRNEGTATYAAAVLFRISEDKNPDYRKRVSVELTNSLFKHDPAAWEAAQSMIPINEPYADDMDATYRPMYSSDVPLDPLDMHMDMDADYPIDTYSDGLRPPYPTADHMLA

SEQ ID NO: 61 - DNA, 2214 bp, Xenopus laevis
  CDS (1)..(2214)
atggatttgggagacgtagtggaaatgccaatgaaggtcacagagtggcagaaaacctacacttacgactcgggcatcaactctggaataaacacgtctgttccatcattgaatgggaaaatggtcattgaggacgacagtctggcctatcccaacagttacaccactgtcaaaaccacaacatacacacagcagcagaatccagacatggaatcccacttaaacatgactcgggcccagcgtgtccgagcagcgatgtatccggagacggtggaagaccactcgtatctgttcagcacacagatagaagggcagcaaacaaatgtgcagaaactggcagaaccctctcaaatgttaaaatctgccatcatgcaccttatcaactaccaggacgatgctgagctggccacccgtgccattcctgaactgaccaagcttcttaatgatgaggatccgatggtggtgaacaaggcttccatgattgtaaaccagctgtccaagaaggaagcgtcacgcaaagccctcatgcagtctccccagattgtggcagccatagttcgcaccatgcaacacacaagtgacatggacactgctcgctgtacaaccagcattctgcacaacctctcccaccaccgcgaggggcttctgtctatcttcaagtccggtggcatccctgcactggtgcgcatgctcagttctccagtagaatctgtgctattctatgccatcaccaccttgcacaacctgctcctctaccaggaaggggcaaagatggcagtgcgtctggcagatggtctccaaaagatggtgcccttgcttaataagaataaccccaagttcttggccatcaccacagactgtctgcaacttctggcctacggaaatcaggagagcaagctaattatattgggcaatggaggcccccaaggtttggttcagatcatgaggaactacaattacgagaagcttctgtggaccactagccgggtgctaaaagtattgtctgtatgtcccagcaataagccagccattgtggaagctggtggaatgcaagctctggggaaacatctgaccagcaacagcccaagacttgtacagaactgcctgtggacattaagaaatctctctgatgtggccacaaaacaggagggcctggataacgttctgaagatcctggtgaaccagctgagctccgatgatgtcaacgtcctcacctgtgccactggcactttgtccaacttaacctgcaacaacggtcgcaacaagactctggtgacccagagcaatggggtggaatctctcattcacaccatcctccgtgcaagtgacaaggacgacattgcagagcctgcggtctgtgccatgcgccatcttaccagtcgccaccaggatgctgaggtagcgcagaactctgtgcgacttcactacggcatccccgccattgtgaaacttctcaacccaccataccagtggccactggtcaaggcaactatcggcttgatccgaaatctggccctgtgtccagccaatcacgctcctttgtatgatgcgggtgttatcccccggctagtccagctgctggttaaatctcaccaagatgcacagaggcatgctgcttctgggacacagcaaccctatacggatggagtgaagatggaagagattgtggaaggctgcactggggctctgcatattcttgccagggatcctgtgaatcgtatggacatctacaagctgaacaccatcccactgtttgtgcagctcctgtattcccccgtggagaacattcagagagtgtcaagcggcgtgctgtgtgagttggctcaggataaagaagcggcagacaccattgatgcagagggagcttcggccccacttatggagttgctgcactcccgcaatgaaggcatagccacatatgctgctgctgttcttttccgcatatccgaggacaaaaacgctgattataggaaacgtgtgtccgtagagctcacaaatgccatcttccgacaggaccctgccgcatgggaagcagcgcagagcatgattcctctcaatgacccttattcagatgaaatggaaaattacagagcgatgtaccctgaagatatcccattagaaccaatggggggagacatggacgtggagtacgcaatggatggctacagcgaccacccaggcaggggccactatgctgataatcacatgatggca

SEQ ID NO: 62 - protein, 738 aa, Xenopus laevis
MDLGDVVEMPMKVTEWQKTYTYDSGINSGINTSVPSLNGKMVIEDDSLAYPNSYTTVKTTTYTQQQNPDMESHLNMTRAQRVRAAMYPETVEDHSYLFSTQIEGQQTNVQKLAEPSQMLKSAIMHLINYQDDAELATRAIPELTKLLNDEDPMVVNKASMIVNQLSKKEASRKALMQSPQIVAAIVRTMQHTSDMDTARCTTSILHNLSHHREGLLSIFKSGGIPALVRMLSSPVESVLFYAITTLHNLLLYQEGAKMAVRLADGLQKMVPLLNKNNPKFLAITTDCLQLLAYGNQESKLIILGNGGPQGLVQIMRNYNYEKLLWTTSRVLKVLSVCPSNKPAIVEAGGMQALGKHLTSNSPRLVQNCLWTLRNLSDVATKQEGLDNVLKILVNQLSSDDVNVLTCATGTLSNLTCNNGRNKTLVTQSNGVESLIHTILRASDKDDIAEPAVCAMRHLTSRHQDAEVAQNSVRLHYGIPAIVKLLNPPYQWPLVKATIGLIRNLALCPANHAPLYDAGVIPRLVQLLVKSHQDAQRHAASGTQQPYTDGVKMEEIVEGCTGALHILARDPVNRMDIYKLNTIPLFVQLLYSPVENIQRVSSGVLCELAQDKEAADTIDAEGASAPLMELLHSRNEGIATYAAAVLFRISEDKNADYRKRVSVELTNAIFRQDPAAWEAAQSMIPLNDPYSDEMENYRAMYPEDIPLEPMGGDMDVEYAMDGYSDHPGRGHYADNHMMA

SEQ ID NO: 63 - DNA, 2235 bp, Bos taurus
  CDS (1)..(2235)
atggaggtgatgaacctgatcgaacagcccatcaaggtgaccgagtggcagcagacatatacctacgactctggcatccactcgggggccaacacctgtgtgccctcgctcagcagcaagggcctcatagaggaggatgaggcctgcgggcgccagtacacgctcaagaagaccaccacctacacccagtcggtgcccccgggccaaggtgacctggagtaccagatgtccacaaccgccagagccaagcgggtgcgggaggccatgtgtcccggtgtgacaggagaggacagctcgctgctgctcaccacccaggtggaggggcagaccaccaacctgcagcggctggctgagccatcccaactcctcaagtcggccatcgtacatctcatcaactaccaggatgatgctgagctggccacccgggccctgcctgagctcaccaagctgctcaatgatgaggacccggtggtggtgaccaaggcggccatgatcgtgaaccagctgtcgaagaaggaggcgtctcggcgggcgctgatgggctcgccccagctggtggcggctgtcgtgcgcaccatgcagaacaccagtgacctggacacggcccgttgcaccaccagcatcctgcacaacctctcccaccaccgcgaggggctgcttgccatcttcaagtcgggcggcatccctgccctggtccgcatgctcagctcccctgtagagtcggtcttgttctatgccatcaccacgctgcacaacctgctgctctaccaggagggtgccaagatggcagtgcgcctggcagacgggctgcagaagatggtgcccctgctcaacaagaacaaccccaagttcctggccatcaccaccgactgcctgcagctcctggcctatggcaaccaggagagcaagctcatcatcctggccaatggaggaccccaggccctcgtccagatcatgcgcaactacagttatgagaagctgctctggaccaccagccgcgtgctcaaagtgctgtccgtgtgtcccagcaacaagcctgccattgtggaggctggtgggatgcaggccctgggcaagcacctgacgagcaatagcccccgccttgtgcagaactgcctgtggaccctgcgcaacctctctgatgtggccaccaagcaggagggcctggagagcgtgctgaagattctggtgaaccagctgagcgtggacgatgtcaatgtcctcacctgtgccacaggcactctgtccaacctgacatgcaacaacagcaagaacaagacgctggtgacacagaacagtggtgtggaggcgctcatccacgccatcctgcgcgcgggcgacaaggatgacatcacggagcccgctgtctgcgccctgcgccacctcaccagccgccaccccgaggccgagatggcccagaactccgtgcgtctcaactatggcatcccagccatcgtcaagctgctcaaccagcccaaccagtggccactggtcaaggcaaccattggcctgatcaggaatctggccctgtgcccagccaaccatgccccactgcaggaggcagcggtcattccccgccttgtccaactgctggtcaaggcccaccaggatgcccagcgccatgtggctgctggcacacagcagccctacacggatggtgtgaggatggaggagattgtggaaggctgcactggagccctgcacatccttgcccgggatcccatgaaccgcatggagatcttccgactcaacaccatccccctgtttgtgcagctcctctactcctcggtggagaacatccagcgcgtggccgccggggtgctgtgcgagctggcccaggacaaggaggcggccgacgccattgatgcggagggcgcgtcggccccactcatggagctgctgcactcgcgcaatgagggcaccgccacctacgccgctgccgtcttgttccgcatctccgaggacaagaacccagattaccgcaaacgggtgtctgtggagctcactaactccctcttcaagcacgaccctgccgcctgggaggctgcccagagcatgatccccatgaatgaaccctatgctgatgacatggacgccacctaccgccccatgtactcgagcgacgtgcccatggacccactggagatgcacatggacatggatggagactatcccatcgacacctacagtgacggcctcaggcccccctacgcaactgcagaccacatgctggcc

SEQ ID NO: 64 - protein, 745 aa, Bos taurus
MEVMNLIEQPIKVTEWQQTYTYDSGIHSGANTCVPSLSSKGLIEEDEACGRQYTLKKTTTYTQSVPPGQGDLEYQMSTTARAKRVREAMCPGVTGEDSSLLLTTQVEGQTTNLQRLAEPSQLLKSAIVHLINYQDDAELATRALPELTKLLNDEDPVVVTKAAMIVNQLSKKEASRRALMGSPQLVAAVVRTMQNTSDLDTARCTTSILHNLSHHREGLLAIFKSGGIPALVRMLSSPVESVLFYAITTLHNLLLYQEGAKMAVRLADGLQKMVPLLNKNNPKFLAITTDCLQLLAYGNQESKLIILANGGPQALVQIMRNYSYEKLLWTTSRVLKVLSVCPSNKPAIVEAGGMQALGKHLTSNSPRLVQNCLWTLRNLSDVATKQEGLESVLKILVNQLSVDDVNVLTCATGTLSNLTCNNSKNKTLVTQNSGVEALIHAILRAGDKDDITEPAVCALRHLTSRHPEAEMAQNSVRLNYGIPAIVKLLNQPNQWPLVKATIGLIRNLALCPANHAPLQEAAVIPRLVQLLVKAHQDAQRHVAAGTQQPYTDGVRMEEIVEGCTGALHILARDPMNRMEIFRLNTIPLFVQLLYSSVENIQRVAAGVLCELAQDKEAADAIDAEGASAPLMELLHSRNEGTATYAAAVLFRISEDKNPDYRKRVSVELTNSLFKHDPAAWEAAQSMIPMNEPYADDMDATYRPMYSSDVPMDPLEMHMDMDGDYPIDTYSDGLRPPYATADHMLA

SEQ ID NO: 65 - DNA, 2235 bp, Sus scrofa
  CDS (1)..(2235)
atggaggtgatgaacctgatcgaacagcccatcaaggtgaccgagtggcagcagacatacacctatgactcgggcatccactcgggggccaacacctgcgtgccctcggtcagcagcaaaggcctcatggaggaggacgaggcctgcgggcgccagtacacgctcaaaaagaccaccacctacacccaggcggtgccccaaagccaaggtgacctggagtaccagatgtccacgacggccagagccaagcgggtgcgggaggccatgtgtcctggtgtgacgggagaggacagctcgctgctgctggccacccaggtggaggggcagaccaccaacctgcagcggctggccgagccatcccagctcctcaagtcggccatcgtgcatctcatcaactaccaggacgacgctgagctggctacccgggccctgcccgagctcaccaaactgctcaacgacgaggacccggtggtggtgaccaaggcggccatgatcgtgaaccagctgtcgaagaaggaggcgtctcggcgggcgctgatgggctcgccccagctggtggcggccgtcgtgcgcaccatgcagaacaccagcgacctggacacggcccgctgcaccaccagcatcctgcacaacctctcccaccaccgcgaggggctgcttgccatcttcaagtccggcggcatccctgccctggtccgcatgctcagctcccccgtggagtcggtcctgttctacgccatcaccacgctgcacaacctgctgctctaccaggagggcgccaagatggcagtgcgcctggccgacgggctgcagaagatggtgcccctgctgaacaagaacaaccccaagttcctggccatcaccaccgactgcctgcagctcctggcctatggcaaccaggagagcaagctcatcatcctggccaatggaggaccccaggccctcgtgcagatcatgcgcaactatagttatgagaagctgctctggaccaccagccgcgtgcttaaggtgctgtctgtgtgtcccagcaataagcctgccattgtggaggccggtgggatgcaggccctgggcaaacacctgacaagcaacagccctcgcctcgtgcagaactgcctctggaccctgcgtaacctctcggacgtggccaccaagcaggagggcctggagagtgtgctgaagattctggtgaaccagctgagcgtggacgatgtcaacgtcctcacctgtgccacgggcactctgtccaacctgacctgcaacaacagcaagaacaagacgctggtgacgcagaacagcggcgtggaggcgctcatccacgccatcctgcgcgcgggcgacaaggatgacatcacggagcccgccgtctgcgccctgcgccacctcaccagccgccaccccgaggctgagatggcccagaactccgtgcgcctcaactacggcatcccggccatcgtcaagctgctcaatcagcccaaccagtggccactggtcaaggcaaccatcggcctgatcaggaatctggccctgtgcccagccaaccacgccccactgcaggaggcatctgtcatcccccgcctcgtccagctgctggtcaaggcccatcaggatgcccagcgccatgtggctgcaggcacacagcagccctacacggatggcgtgaggatggaggagattgtggagggctgcaccggagccctgcacatcctcgcccgggatcccatgaaccgcatggagatcttccgactcaacaccatccccctgtttgtgcagctcctgtactcttccgtggagaacatccagcgtgtggccgcaggggtgctgtgcgagttggcccaggacaaggaggcggccgacgctattgatgccgagggggcctcgtcccccctcatggagctcctgcactcccgcaatgagggcactgccacctatgctgctgctgtcttgttccgcatctctgaggacaagaacccagattaccgtaagcgtgtgtctgtggaactcaccaactccctcttcaagcacgaccctgcagcctgggaggctgcccagagcatgatccccatcaatgaaccctatgccgatgacatggatgccacctaccgccccatgtactcaagtgatgtgcccctggaccccctggagatgcacatggacatggacggggactatcccatggacacctacagcgacggcctcaggcccccctaccccgctgcagaccacatgctggcc

SEQ ID NO: 66 - protein, 745 aa, Sus scrofa
MEVMNLIEQPIKVTEWQQTYTYDSGIHSGANTCVPSVSSKGLMEEDEACGRQYTLKKTTTYTQAVPQSQGDLEYQMSTTARAKRVREAMCPGVTGEDSSLLLATQVEGQTTNLQRLAEPSQLLKSAIVHLINYQDDAELATRALPELTKLLNDEDPVVVTKAAMIVNQLSKKEASRRALMGSPQLVAAVVRTMQNTSDLDTARCTTSILHNLSHHREGLLAIFKSGGIPALVRMLSSPVESVLFYAITTLHNLLLYQEGAKMAVRLADGLQKMVPLLNKNNPKFLAITTDCLQLLAYGNQESKLIILANGGPQALVQIMRNYSYEKLLWTTSRVLKVLSVCPSNKPAIVEAGGMQALGKHLTSNSPRLVQNCLWTLRNLSDVATKQEGLESVLKILVNQLSVDDVNVLTCATGTLSNLTCNNSKNKTLVTQNSGVEALIHAILRAGDKDDITEPAVCALRHLTSRHPEAEMAQNSVRLNYGIPAIVKLLNQPNQWPLVKATIGLIRNLALCPANHAPLQEASVIPRLVQLLVKAHQDAQRHVAAGTQQPYTDGVRMEEIVEGCTGALHILARDPMNRMEIFRLNTIPLFVQLLYSSVENIQRVAAGVLCELAQDKEAADAIDAEGASSPLMELLHSRNEGTATYAAAVLFRISEDKNPDYRKRVSVELTNSLFKHDPAAWEAAQSMIPINEPYADDMDATYRPMYSSDVPLDPLEMHMDMDGDYPMDTYSDGLRPPYPAADHMLA

SEQ ID NO: 67 - DNA, 2187 bp, Danio rerio
  CDS (1)..(2187)
atggaaatgcacatgggagaggctccaggttcggtgaaggtcacagagtggcagcagtcgtactacggcacagattcaggcatccattcaggagccactactgttcgctcagatgatgatggaacagagtacagctctaagaaattcacctacaccaccacattcacagagaaccctgcagaggtggagtctcagttaaatatgactcgtgctcagcgtgtgagggcggccatgtttcctgagactgtgatggagggatcggtcattcattctacacagatcgatccatcccagcagaccaatgtacagaagctggccgaaccatctcagcagctcaaagctgccatcgttcacctcatcaactaccaggacgacgctgaactcgccacacgcgccatcccagagctcaccaaactcctcaacgatgaagaccagttggttgtgaacaaagccgctatgatcgtgaaccaactgacccgcaaggaggcatcccgccgggctcttatgcagtccccgcagatggtggccgctgtagtgagagccatgcagaacacgaccgacatggagacgacccgcgccacagccagcatcctgcacaacctctcgcaccagcgtgaaggactgctcgccatcttcaaatcaggcggcattccagctctggtgcgcatgctgagctctccgatggactctgtacttttctacgccatcaccaccctgcacaacctgcttttgcaccaagagggagccaagatggcggtgcgtctggctgatggtctccagaggatggttcccctgctgaagaaaagcaaccccaaattcctggccatcaccacagactgcttgcagctgctgtcctatggcaaccaggagagcaagctgattatcctggctaatggtggtcctgagggtcttgtcaacatcatgaggacttacaactatgagaagctgctgtggaccaccagtcgtgtgctgaaagtgctctctgtctgtccaagcaacaagcctgccatcgtagatgctggtggaatgcaagctcttggtaaacatctgtccggctcaagtcagcgtctgatgcaaaactgcttgtggactttgagaaacttgtcagatgctgcaaccaaacaggacggtatggagaatcttcttcaagtcttggtcggtctgctgtctgctgatgacatcaacatgctgacctgtgccacaggcgtcctgtccaacctcacctgcaacaacacacgcaacaaaacgcaggtgacccagagtaacggcgtggaggctcttattcacaccatcctgagggccagttcaaaacaggacgtgatcgagccagccgtctgcgccctgcgccacctcaccagccggcacccagaggctgagactgcacagaacgccgtacgaatgcattacggcatccctgctattgtcaaactgctcaatcaaccctaccactggccagttgtcaaggctgtggttggtctgatccgtaacctggccctgtgtccagccaatcaggctcctttgagggacgctgacgccattcccaaactggtcactttgctttcaaaagctcatcaggatgcacagaaacccggttcatctgctcaacgatcataccaggatggggtaagaatggaggagattgttgagggctgcactggtgctcttcatatcatggccagagatcctatgaaccgaggcaccattgccagcatggacaccattcctctgtttgttcagctgttgtattctccactggataacgtcaagcgtgtggcagctggtgttctgtgtgagctggctcttgataaacagtcggctgagatcatcgatgcggaaggagccagtgctcctctcatggagctccttcactccagcaacgaagggatcgccacctatgctgctgctgttctctacagaactgctgaggacaaaaacccagactataagaaaagagtttcagtagaactcacacactcactcttcaaacatgaccctgaggcttgggaaatggcacacaacactgtgatggatcccgtccttggcgatgaagagcttgatggctacggtcctgcaggatacggtggatatgctgatggcatgcatatggatcctctagatccagaaatgcaagacgattttaggagcggcatgccctacaactccatggccagagtctaccatgattac

SEQ ID NO: 68 - protein, 729 aa, Danio rerio; identical to SEQ ID NO: 56

SEQ ID NO: 69 - DNA, 1734 bp, Saccharomyces cerevisiae
  CDS (1)..(1734)
atgggttcatgttgtagttgcttgaaagattcttcagacgaggccagtgtctcaccaattgccgataatgaaagagaagcggtgactttattactagggtatttggaggataaagaccaattagacttttactctggtggtccactaaaggccctaactactttggtgtattcagataatctaaatttgcaaaggagcgccgctctggcattcgcagaaattactgaaaaatacgtccgtcaggtctctagagaggtactggaacccatcttaatattattacaaagccaagatccacagattcaagtggccgcttgtgcagccttgggtaatttggccgttaataatgaaaataaattattaattgtggaaatgggaggcttagagccattaataaaccaaatgatgggtgacaatgtagaagttcaatgtaatgctgttggatgcattaccaatttagccacaagggatgacaataaacataagattgctacttctggtgctttaattccattgactaagctagctaaatccaaacatataagagttcagagaaatgctacaggtgcattattaaatatgacacattctgaggaaaatagaaaagaattggttaatgcaggtgctgtgcctgtattggtatctttactgtcgtccaccgatcctgatgttcagtactattgtactactgctttatcaaatatagcagtggatgaagccaatcgcaagaagttggctcaaactgagccaagattggtttccaaattggttagtctgatggattctccatcttcaagggtaaaatgtcaagctactttggctttacgaaacctagcgtccgatacaagctaccaattagaaattgtaagggctggtgggttgcctcatttggtaaagttgattcaaagtgattctataccactggttttggctagtgtggcatgcattagaaacatttctattcaccctctaaatgaaggtttaattgttgatgcaggtttcttaaaaccattagtaagattgttggactataaggattcagaagaaattcaatgtcacgccgtatctactttgagaaatttggctgcatcatctgaaaaaaacagaaaagagttcttcgaaagtggtgctgtcgaaaaatgtaaggaactggctctagattcacctgttagtgttcaaagtgaaatttccgcatgttttgctattttagccctagcagatgtctccaaattggatctactggaagcaaatatcttagatgctttaatccctatgactttttcccagaaccaagaagtttctggtaatgctgctgctgctttggcaaatctatgttcaagagtgaataattatacaaaaattattgaagcatgggatcgtccgaatgaaggcattcgtggatttctgattagatttttgaaaagtgactatgctacctttgaacacattgcgctatggacaattttacaattgctagaaagtcataatgataaagtggaagatttggttaaaaatgatgacgacatcattaacggagtgagaaaaatggcagatgtgacctttgagcgtttacaaagatcaggaattgatgttaaaaatccggggagcaacaacaatccaagctcgaatgataacaacagtaataacaatgacacaggatctgaacatcaacctgtagaggatgcaagtttggaattgtataatattactcaacagattttacaatttttacat

SEQ ID NO: 70 - protein, 578 aa, Saccharomyces cerevisiae
MGSCCSCLKDSSDEASVSPIADNEREAVTLLLGYLEDKDQLDFYSGGPLKALTTLVYSDNLNLQRSAALAFAEITEKYVRQVSREVLEPILILLQSQDPQIQVAACAALGNLAVNNENKLLIVEMGGLEPLINQMMGDNVEVQCNAVGCITNLATRDDNKHKIATSGALIPLTKLAKSKHIRVQRNATGALLNMTHSEENRKELVNAGAVPVLVSLLSSTDPDVQYYCTTALSNIAVDEANRKKLAQTEPRLVSKLVSLMDSPSSRVKCQATLALRNLASDTSYQLEIVRAGGLPHLVKLIQSDSIPLVLASVACIRNISIHPLNEGLIVDAGFLKPLVRLLDYKDSEEIQCHAVSTLRNLAASSEKNRKEFFESGAVEKCKELALDSPVSVQSEISACFAILALADVSKLDLLEANILDALIPMTFSQNQEVSGNAAAALANLCSRVNNYTKIIEAWDRPNEGIRGFLIRFLKSDYATFEHIALWTILQLLESHNDKVEDLVKNDDDIINGVRKMADVTFERLQRSGIDVKNPGSNNNPSSNDNNSNNNDTGSEHQPVEDASLELYNITQQILQFLH

SEQ ID NO: 71 - DNA, 14052 bp, Homo sapiens
  CDS (1)..(14052)
atggtggccggcatgctcatgccacgggaccagctgcgggccatctatgaggtgctcttccgcgagggcgtgatggtggccaagaaggaccggcggccccgcagcttgcacccccatgtgcccggcgtcaccaacctgcaggtcatgcgtgccatggcgtccctgcgggcacggggcctggtccgcgagacctttgcctggtgccacttttactggtacctcaccaatgaaggcatcgcccacctccgccagtacctgcacctgccgccagagatcgtgcccgcctctctgcagcgcgtgcgccgccccgtcgccatggtgatgcccgcacgccgcaccccccacgtgcaggctgtgcagggtcccctgggctccccacccaagcgggggccgctgccgacggaggagcagcgggtctaccgtcggaaggagcttgaggaggtgtcacctgagacccctgtggtgcctgctaccacccagcggaccctggccaggccaggcccggagcctgccccagccacagatgagcgggatcgtgtgcagaagaaaaccttcaccaagtgggtcaacaagcacctcatcaaggcccagaggcacatcagtgacctgtatgaagacctccgcgatggccacaacctcatctccctgctggaggtcctctcgggggacagcctgccccgggagaaggggaggatgcgtttccacaagctgcagaatgtccagattgccctggactacctccggcaccgccaggtgaagctggtgaacatcaggaatgatgacatcgctgacggcaaccccaagctgacccttggcctcatctggacaatcattctgcacttccagatctcagatatccaggtgagtgggcagtcggaggacatgacggccaaggagaagctgctgctgtggtcgcagcgaatggtggaggggtaccagggcctgcgatgcgacaacttcacctccagctggagagacggccgcctcttcaatgccatcatccaccggcacaagcccctgctcatcgacatgaacaaggtgtaccggcagaccaacctggagaacctggaccaggccttctctgtggcggagcgggacctgggagtgacgcggctcctggaccctgaggacgtggatgtccctcagcccgacgagaagtccatcatcacctacgtctcgtcgctgtatgacgccatgccccgcgtgccggacgtgcaggatggggtgagggccaacgagctgcagctgcgctggcaggagtaccgggagctggtgctgctgctgcttcagtggatgcgacaccacacggccgcctttgaggaacgcaggttcccctccagcttcgaggagattgagatcctgtggtctcagttcctgaagtttaaggagatggagctaccagccaaggaggccgacaagaacaggtccaagggcatctaccaatccctggagggagcggtgcaagcaggccagctcaaggtgccccctggctaccacccgctggatgtggagaaggagtggggcaagctgcacgtggccatcctggagcgggagaagcagctccgcagcgagtttgagaggctggagtgtcttcagcgcatcgtgaccaagctgcagatggaggcggggctgtgtgaggagcagctgaaccaggccgacgccctgctgcagtcggatgtccggctgctggctgcaggcaaagtgccacagcgggcgggggaggtggaacgggacttggacaaggcggatagcatgatccggctgctcttcaacgacgtgcagaccctcaaggatggacggcacccgcagggcgagcagatgtaccgcagggtgtaccgtctgcacgagcgcctggtagccatccgcaccgagtacaacctacggctgaaggcaggcgtggcggcccctgcaacccaggtggcccaggtgactctgcagagtgtgcagaggcgccccgagctggaggactccactctgcgctacctgcaggacctgctggcctgggtggaggagaaccagcaccgtgtggatggcgctgagtggggtgtggacctgcccagcgtggaggcgcagctgggcagccaccgaggcctgcaccagtccatcgaagaattccgggccaagatcgagcgggcacggagtgacgagggccagctctcccccgccacccggggtgcctaccgtgactgcctgggtcggctggacctgcagtacgccaagctgctgaactcctccaaggcccgcctcaggtccctggagagcttgcacagctttgtggcagccgccactaaggagctaatgtggctgaatgagaaggaggaggaggaggtgggcttcgactggagcgaccgcaacaccaacatgaccgccaagaaggagagctactcggcgctgatgcgggagctggagctgaaggagaagaagatcaaggagctccaaaatgctggggaccggctgctgcgggaggaccacccggcccggcccacggtggagtccttccaggcggccctgcagacgcagtggagctggatgctacagctgtgctgctgtatcgaggcacacctgaaggagaacgctgcctactttcagttcttctcagatgtgcgggaggccgaggggcagttgcagaagctgcaggaggcactgcgtaggaaatacagttgtgatcgctccgccaccgtcacccggctggaggacctgctgcaggatgcccaggacgagaaggaacagctgaacgagtacaagggccacctctcaggcctggccaagcgggccaaggccgtcgtgcagctgaagccccgccacccagcccaccccatgcggggccgcctgcccctgctggccgtgtgcgactataagcaggtggaggtgactgtgcacaagggtgacgagtgccagctggtgggccctgcacagccgtcccactggaaggtgctcagcagctccggcagcgaggccgccgtgccctccgtgtgcttcctggtgcccccgcccaaccaggaggcccaggaggccgtcaccaggctggaggcccagcaccaggccctggtcacgctgtggcaccagttgcacgtggacatgaagagccttctggcctggcagagccttcgccgcgacgtgcagctcatccgctcctggtccctggccacgttccgcaccctgaagccagaggagcagcgccaagccctgcacagcctggagctgcactaccaggccttcctgcgggacagccaggacgcgggcggcttcggacccgaggaccggctgatggctgagcgcgagtacggctcctgcagccaccactaccagcagctgctgcagagcctggaacagggtgcacaggaagagtctcgctgccagcgctgcatctccgagctcaaagacatccggctgcagctggaggcctgtgagacgcgcaccgtgcaccgcctgcggctgccgctggacaaagagccggcacgggagtgtgcccagcgcatcgccgagcagcagaaggcacaggcagaggtggaggggctgggcaagggggtcgcccggctctctgccgaggccgagaaggtcttggccctaccagagccatcgcctgcggcccccacgctgcgctcggagctggagctgacgctgggcaagctggagcaggtccgcagcctgtctgccatctacctggagaagctcaagaccatcagcctggtgatccgcggcacgcagggggccgaggaggtgctcagggcccacgaggagcagctcaaggaggcccaggccgtgccggccaccctcccggagctcgaggccaccaaggcctctctgaagaagctgcgggcccaggccgaggcacagcagcccacgttcgacgccctgcgggatgagctgcggggggcacaggaggtgggggagcgactgcagcagcggcacggggagcgggacgtggaggtggagcgctggcgggagcgggtcgcccagttgcttgagcgctggcaggctgtgctggcccagaccgacgtgcggcagcgcgagctcgagcaactgggccgccagctgcgttactaccgcgagagtgcagaccccttgggcgcctggctgcaggacgccaggcggcggcaggagcagatccaggccatgccgctggccgacagccaggctgtgcgggagcagctgcggcaggagcaggccctgctggaggagatcgagcgccacggcgagaaggtcgaggagtgccagaggtttgcgaaacagtacatcaacgccatcaaggactatgaactccagctggtgacgtacaaggcgcagcttgagccggtggcctccccggccaagaagcccaaggtccagtcgggatcagagagtgtcatccaggagtacgtggacctgcgtacgcactacagcgagctgaccacactgacgagccagtacatcaagttcatcagcgagactctgcggcgcatggaggaggaggagaggctggctgagcagcagcgggcagaggagcgcgagcggctggccgaggtggaggccgcgctggagaagcagcggcagctggccgaggcgcacgcccaggcaaaggcacaggcggagcgggaggcgaaggagctgcagcagcgcatgcaggaggaggtggtgcggcgggaggaggcggcggtggacgcgcagcagcagaagcgcagcattcaggaggagctgcagcagctgcggcagagctcggaggcggagatccaggccaaggcccggcaggcagaggcggctgagcgcagccggctgcgcatcgaggaggagatccgcgtggtgcgcctgcagttggaggccaccgagcgccagcgtggcggggctgagggggagctgcaggcactgcgtgcacgggcggaggaggctgaggcacaaaagcgacaggcgcaggaggaggccgagcgcttgcggaggcaggtgcaggacgagagccagcgtaagcggcaggcggaggtggagctggcctcgcgcgtgaaggccgaggccgaggcggcgcgcgagaagcagcgggccctgcaggccctggaggagctgcggctgcaggcggaggaggcggagcggcgcctgcggcaggccgaggtggagcgagcgcggcaggtacaggtggccctggagacggcgcagcgcagtgcagaggcggagctgcagagcaaacgcgcctccttcgccgagaagacggcacagctggagcgctccctgcaggaggaacacgtggctgtggcacagctgcgggaggaggctgagcggcgggcacagcagcaggccgaggccgagcgggcgcgcgaggaggcagagcgggagctggagcgctggcagctcaaggccaacgaggcgctacggctgcggctgcaggcggaggaggtggcgcagcagaagagcctggcgcaggccgaggctgagaagcagaaggaggaggcggagcgcgaggcgcggcggcgcggcaaggcggaggagcaggccgtccggcagcgggagctggctgaacaagagctggagaagcagcggcagctggcggaaggcaccgcgcagcagcgcctggccgcggagcaggagttgatccggctgcgggccgagacggagcagggggagcagcagcggcagctgctggaggaggagctggcccggctgcagcgtgaggcggctgcagccacgcagaaacggcaggagctggaagccgagctggccaaggtgcgggccgagatggaggtgctgctggccagcaaggcgagggctgaggaggagtcgcgctccaccagcgagaagtccaagcagaggctggaggccgaggccggccggttccgcgagctggccgaggaggccgcccgcctgcgtgccctggcggaagaggccaagcggcagcggcagctggccgaggaagacgcggcgcggcagcgggccgaggcggagcgggtgcttgcggagaagctggccgccatcggcgaggccacgcggctcaagacggaggcggagatcgcgctcaaggagaaggaggcggagaacgagcgcctgcggcggctggcggaggacgaggccttccagcggcggcggctggaggagcaggccgcgcaacacaaggctgacatcgaggagcgcctggcccagctgcgcaaggcatcggacagcgagctggagcggcagaaggggctggtggaggacacgctgaggcagcggcggcaggtggaggaggagatcctggcgctgaaggcgagcttcgagaaggcggccgctggcaaggcggagctggagctggagctgggacgcatccgcagcaacgcggaggacacgctgcgcagcaaggagcaggccgagctggaggctgcgaggcagcggcagctggcggcggaggaggagcggcggcgccgtgaggctgaggagcgcgtgcagaagagcctggcggccgaggaggaggccgcacggcagcggaaggcggcgctggaggaagtcgagcggctgaaagccaaggtggaggaggcgcggcgcctgcgggagcgagcggagcaggagtcggcgcggcagctgcagctggcccaggaggccgcccagaagcggctgcaggcggaagagaaggcacacgccttcgcggtgcagcagaaggagcaggagctacagcagacgctgcagcaggagcagagcgtgctggaccagctgcgcggcgaggcggaggcggcccggcgggcggctgaggaggcggaggaggcccgggtgcaggcggagcgtgaggcggcgcagtcccggcggcaggtggaagaggccgagcggctgaagcagtcggcagaggagcaggcacaggcccgggctcaggcacaggcggctgcagagaagctgcgcaaggaggccgagcaagaggcggcgcggcgggcacaggcggagcaggcggccctgcggcagaagcaggcagctgacgcggagatggagaagcataagaaattcgccgagcagacgctgcggcagaaggcgcaggtggagcaggagctgacaacactgcggctgcagctggaggagaccgaccaccagaagaacctgctggacgaggagctgcagcggctgaaggcggaggccacggaggccgcacgccagcgcagccaggtggaggaggagctcttctcggtgcgcgtgcagatggaggagctgagcaagctcaaggcacgcatcgaggctgagaaccgcgcactcatcttgcgtgacaaggacaatacgcagcgcttcctgcaggaggaggctgagaagatgaagcaggtggcggaggaggccgcgcggctgagtgtggcggcccaagaggctgcgcgactgcggcagctggcagaggaggacctggcacagcagcgggccttggcagagaagatgctcaaggagaagatgcaggcggtgcaggaggccacgcgactcaaggctgaggcggaactgctgcagcagcagaaggagcttgcgcaggagcaggcgcggcggctgcaggaggacaaggagcagatggcgcagcagctggcggaggagacgcagggcttccagcggacgctggaggccgagcggcagcggcagctggagatgagcgctgaggctgagcgcctcaagctgcgtgtggccgagatgagccgagcccaggcccgcgctgaggaggacgcccagcgcttccggaagcaggcggaggagatcggtgagaagctgcaccgcacggagctcgccacccaggagaaggtgaccctggtgcagacactggagatccagcgacagcagagtgaccatgatgccgagcgcctgcgggaggccatcgctgagctggagcgtgagaaggagaagctccaacaggaggccaaactgctgcagctcaagtctgaggagatgcagacggtgcagcaggagcagctgctgcaggagacgcaggccctgcagcaaagcttcctctctgaaaaggacagcctgctacagcgggagcgcttcatcgagcaggagaaggccaagctggagcagctcttccaggacgaggtggccaaggcacagcagctgcgtgaggagcagcagcggcagcagcagcagatggagcaggaacggcagcggctggtggccagcatggaggaggcgcggcggcggcagcatgaggccgaggagggcgtgcggcgcaagcaggaggagctgcagcagctggagcagcagcggcggcagcaggaggagctgctggctgaggagaaccagaggctgcgtgagcagctgcagctcctggaggagcagcaccgggccgcgctggcgcactcagaggaggtcactgcctcgcaggtggctgccacaaagaccctgcccaatggccgggatgcacttgatggccccgcggcagaggcagagccggagcacagcttcgatggcctgcggcggaaggtgtcagctcagaggctgcaggaggccggcatcctgagtgcggaggagctgcagcggttggcgcagggccacaccacggtggacgagctcgcacggcgggaagacgtgcgccactacctgcagggccgcagcagtatcgcagggctgttgctgaaggccaccaatgagaagctgagtgtttacgccgccctgcagaggcagctgctgagtcccggcacggccctcatcctgctggaggcgcaggcggcctcaggcttcctgctggaccctgtgcggaaccggcggctgaccgtcaacgaggctgtgaaggagggtgtggtgggccccgagctgcaccacaagctgctgtcggccgagcgcgccgtcactggctacaaggacccctacactggccagcagatctctctcttccaagccatgcagaagggcctcatcgtccgggagcacggcatccgcctgctggaggcccagatcgccacgggcggcgttatcgaccccgtgcacagccaccgcgtgcccgtggacgtggcctaccggcgcggctacttcgacgaggagatgaaccgcgtcctggcggaccccagcgacgacaccaagggcttctttgaccccaacacgcacgagaacctcacgtacctgcagctactggagcgctgcgtggaggaccccgagacgggcctgtgccttctgccactcacggataaggctgccaagggcggggagctggtctacactgactccgaggcccgggacgtctttgagaaggccaccgtgtctgcgccgttcggcaagttccagggcaagacggtgaccatttgggagatcatcaactcggaatacttcacggcagagcagcggcgggacctgctgcggcagttccgcacgggccggatcacagtggagaagatcatcaagatcatcatcacggtggtggaggagcaggagcagaagggccggctttgctttgagggcctgcgcagcctggtgccagccgccgagctgctggagagcagggtcatcgaccgcgagctctaccagcagctgcagcgaggtgagcgctctgtgcgagacgtagccgaggtggacactgtgcggcgggctctccggggtgccaacgtcatcgcgggtgtatggctggaggaggcggggcagaagctgagtatctacaatgccctgaagaaagacctgctgccatccgacatggccgtggccctgttggaagcccaggccggcaccgggcacatcatcgaccccgccaccagcgcccggctgaccgtggacgaggcagtgcgtgctggcctggtgggccccgagtttcatgagaagctgctatcagccgagaaggctgtgacagggtacagggacccctacacagggcagagcgtctccctgttccaggccctgaagaagggcctcattccccgggagcagggcctgcgcctgttggacgcccagctgtccacgggcggcatcgtggaccccagcaagagccaccgcgtgcccctggatgtcgcctgcgcccgaggctgcctggatgaggagaccagcagggccctgtcggcaccaagggccgacgccaaggcctacagtgaccccagcacaggggagccggccacctacggcgagctccagcagcggtgccggcccgaccagctgaccgggctgagcctgctgccgctctcagaaaaggctgctcgggcccggcaggaggagctctactcagagctgcaggcccgtgagacctttgaaaagaccccggttgaggtccccgtgggtggcttcaagggcaggacggtgacggtgtgggagctcatcagctctgagtacttcactgcggagcagcggcaggagctgttgcgtcagttccgcacgggcaaggtcaccgtggagaaggtcatcaagattctcattaccatcgtggaggaggtggagaccctgcggcaggagaggctgtccttcagcggcctccgtgcccctgtgccagccagcgagctcctggcttccggggtcctcagcagagcccagtttgagcagctcaaggacggcaagacgacggtcaaggacctttcggagctgggctccgtgcggacgctgctgcagggcagtggctgcctcgccggcatctacctggaggacaccaaggagaaggtgtccatctacgaggccatgcgccggggcctgctgagagccacaacggctgcgctcctgctggaggcgcaggcggccactggcttcctggtggaccccgtgcggaaccagcgcctgtatgtccacgaggccgtgaaggcgggcgtggtgggccccgagcttcacgagcagctgctgtctgccgagaaggccgtcaccggctacagagacccctactcgggcagcaccatctccctcttccaggccatgcagaagggcctggttctccggcagcacggcatccgcctgctggaggcccagatcgccacgggcggcatcatcgaccccgtgcacagccaccgcgtgcctgtggacgtggcctaccagcgcggctacttcagtgaggagatgaaccgcgtcctggcggaccccagcgacgacaccaagggcttctttgaccccaacacgcatgagaacctcacgtacaggcagctgctggagcggtgcgtggaggaccccgagacgggcttgcgccttctgccactgaaaggggcggagaaggctgaggtggtggagaccacgcaggtgtacactgaggaggagacaagaagggcatttgaagagacacagatcgacattcccggcggcggcagccacggcggctccaccatgtccctgtgggaggtgatgcagtcggacctgatccccgaggagcagcgggcccagctgatggctgacttccaggccggccgggtgaccaaggaacgcatgatcatcatcatcatcgagatcattgagaagacagagatcatccgccagcagggtctggcctcctacgactacgtgcgccgccgcctcacggctgaggacctgttcgaggctcggatcatctctctcgagacctacaacctgctccgggagggcaccaggagcctccgtgaggctctcgaggcggagtccgcctggtgctacctctatggcacgggctccgtggctggtgtctacctgcccggttccaggcagacactgagcatctaccaggctctcaagaaagggctgctgagtgccgaggtggcccgcctgctgctggaggcacaggcagccacaggcttcctgctggacccggtgaagggggagcggctgactgtggatgaggctgtgcggaagggcctcgtggggcccgagctgcacgaccgcctgctctcggctgagcgggcggtcaccggctaccgtgacccctacaccgagcagaccatctcgctcttccaggccatgaagaaggagctgatccctactgaggaggccctgcggctgctggatgcccagctggccaccggcggcatcgtggacccccgcctgggcttccaccttcccctggaggtggcttaccagcgtggctacctcaacaaggacacgcacgaccagctgtcagagcccagcgaggtgcgcagctacgtggacccgtccaccgacgagcgcctcagctacacgcagctgctcaggcggtgccgtcgtgacgacggcaccggccagctgctcctgccactgtcggacgcccgcaagctgaccttccgtggcctgcggaagcagatcaccatggaggagctggtgcgctcgcaggtcatggacgaggccacggcgctgcagctgcgggagggcctgacctccatcgaggaggtcaccaagaacttgcagaagttcctggaaggcaccagctgcatcgctggtgtcttcgtggacgccaccaaggaacggctctcggtgtaccaggccatgaagaagggcatcatccgccccggcacagcctttgagctcctggaggcgcaggcggccaccggttacgtcatcgaccccatcaagggactgaagctgacggtggaggaggctgtgcgtatgggcattgtgggccccgagttcaaggacaagctgctgtcggccgagcgcgccgtcactgggtacaaggacccctactctgggaagctcatctccctcttccaggccatgaagaagggcctgatcctgaaggaccatggcatccgcctgctggaggcccagatcgccacgggcggcatcatcgaccctgaggagagccaccggctgcccgtggaggtggcctacaagcgcggcctcttcgatgaggagatgaacgagatcctgaccgacccctcggacgacaccaagggcttctttgaccctaacacggaggagaacctcacctacctgcagctgatggagcgttgtatcactgacccccagacgggcctgtgtctcttgccgctgaaggagaagaagcgggagcggaagacgtcctccaagtcctccgtgcgcaagcgccgagtggtcatcgtggaccccgagacgggcaaggagatgtcagtgtacgaggcctaccgcaagggcctgattgaccaccagacgtacctggagctgtccgagcaggagtgcgagtgggaggagatcaccatctcctcctcggacggcgtggtcaagtccatgatcatcgaccgccgctccgggcgccagtacgacatcgatgatgccatcgccaagaacctcatcgaccgctcggcactggaccagtaccgcgccggcacgctctccatcaccgagttcgccgacatgctctcgggcaacgccggtggtttccgctcccgttcctcctcggtgggatcctcctcctcctaccccatcagccccgccgtctccaggacccagctggcctcctggtcagaccccactgaggagacgggccccgtggctggcatcctggacacggagacgctggagaaggtgtccatcaccgaggccatgcaccggaacctggtggataacatcacggggcagcggctgctggaggcgcaggcctgcaccgggggcatcatcgaccccagcaccggtgagcgcttccctgtcaccgacgccgtcaacaagggcctggtggacaagatcatggtggaccgcatcaacctggcccagaaggccttctgcggcttcgaggacccacgcaccaagaccaagatgtcggccgcccaggccctgaagaagggctggctctactacgaggccggccagcgcttcctggaggtgcagtacctgaccggcggcttgatcgagcccgacacgccgggccgcgtgcccctggacgaggccctgcagcgcggcacggtggacgcccgcaccgcacagaagctgcgtgacgtgggcgcctactccaagtacctcacctgccctaagaccaagctcaagatctcctataaggacgcgctggaccgcagcatggtggaggagggcacggggctgcggctgctggaggctgccgcgcagtccaccaagggctactacagcccctacagcgtcagcggctccggctctaccgctggctcccgcaccggctcgcgcaccggctcccgggccggctcccgccgcggcagctttgacgccaccggctccggcttctccatgaccttctcttcatcctcctactcctcctcgggctacggccgccgctacgcctcggggtcctcggcctccctggggggccctgagtctgccgtggcc

SEQ ID NO: 72 - protein, 4684 aa, Homo sapiens
MVAGMLMPRDQLRAIYEVLFREGVMVAKKDRRPRSLHPHVPGVTNLQVMRAMASLRARGLVRETFAWCHFYWYLTNEGIAHLRQYLHLPPEIVPASLQRVRRPVAMVMPARRTPHVQAVQGPLGSPPKRGPLPTEEQRVYRRKELEEVSPETPVVPATTQRTLARPGPEPAPATDERDRVQKKTFTKWVNKHLIKAQRHISDLYEDLRDGHNLISLLEVLSGDSLPREKGRMRFHKLQNVQIALDYLRHRQVKLVNIRNDDIADGNPKLTLGLIWTIILHFQISDIQVSGQSEDMTAKEKLLLWSQRMVEGYQGLRCDNFTSSWRDGRLFNAIIHRHKPLLIDMNKVYRQTNLENLDQAFSVAERDLGVTRLLDPEDVDVPQPDEKSIITYVSSLYDAMPRVPDVQDGVRANELQLRWQEYRELVLLLLQWMRHHTAAFEERRFPSSFEEIEILWSQFLKFKEMELPAKEADKNRSKGIYQSLEGAVQAGQLKVPPGYHPLDVEKEWGKLHVAILEREKQLRSEFERLECLQRIVTKLQMEAGLCEEQLNQADALLQSDVRLLAAGKVPQRAGEVERDLDKADSMIRLLFNDVQTLKDGRHPQGEQMYRRVYRLHERLVAIRTEYNLRLKAGVAAPATQVAQVTLQSVQRRPELEDSTLRYLQDLLAWVEENQHRVDGAEWGVDLPSVEAQLGSHRGLHQSIEEFRAKIERARSDEGQLSPATRGAYRDCLGRLDLQYAKLLNSSKARLRSLESLHSFVAAATKELMWLNEKEEEEVGFDWSDRNTNMTAKKESYSALMRELELKEKKIKELQNAGDRLLREDHPARPTVESFQAALQTQWSWMLQLCCCIEAHLKENAAYFQFFSDVREAEGQLQKLQEALRRKYSCDRSATVTRLEDLLQDAQDEKEQLNEYKGHLSGLAKRAKAVVQLKPRHPAHPMRGRLPLLAVCDYKQVEVTVHKGDECQLVGPAQPSHWKVLSSSGSEAAVPSVCFLVPPPNQEAQEAVTRLEAQHQALVTLWHQLHVDMKSLLAWQSLRRDVQLIRSWSLATFRTLKPEEQRQALHSLELHYQAFLRDSQDAGGFGPEDRLMAEREYGSCSHHYQQLLQSLEQGAQEESRCQRCISELKDIRLQLEACETRTVHRLRLPLDKEPARECAQRIAEQQKAQAEVEGLGKGVARLSAEAEKVLALPEPSPAAPTLRSELELTLGKLEQVRSLSAIYLEKLKTISLVIRGTQGAEEVLRAHEEQLKEAQAVPATLPELEATKASLKKLRAQAEAQQPTFDALRDELRGAQEVGERLQQRHGERDVEVERWRERVAQLLERWQAVLAQTDVRQRELEQLGRQLRYYRESADPLGAWLQDARRRQEQIQAMPLADSQAVREQLRQEQALLEEIERHGEKVEECQRFAKQYINAIKDYELQLVTYKAQLEPVASPAKKPKVQSGSESVIQEYVDLRTHYSELTTLTSQYIKFISETLRRMEEEERLAEQQRAEERERLAEVEAALEKQRQLAEAHAQAKAQAEREAKELQQRMQEEVVRREEAAVDAQQQKRSIQEELQQLRQSSEAEIQAKARQAEAAERSRLRIEEEIRVVRLQLEATERQRGGAEGELQALRARAEEAEAQKRQAQEEAERLRRQVQDESQRKRQAEVELASRVKAEAEAAREKQRALQALEELRLQAEEAERRLRQAEVERARQVQVALETAQRSAEAELQSKRASFAEKTAQLERSLQEEHVAVAQLREEAERRAQQQAEAERAREEAERELERWQLKANEALRLRLQAEEVAQQKSLAQAEAEKQKEEAEREARRRGKAEEQAVRQRELAEQELEKQRQLAEGTAQQRLAAEQELIRLRAETEQGEQQRQLLEEELARLQREAAAATQKRQELEAELAKVRAEMEVLLASKARAEEESRSTSEKSKQRLEAEAGRFRELAEEAARLRALAEEAKRQRQLAEEDAARQRAEAERVLAEKLAAIGEATRLKTEAEIALKEKEAENERLRRLAEDEAFQRRRLEEQAAQHKADIEERLAQLRKASDSELERQKGLVEDTLRQRRQVEEEILALKASFEKAAAGKAELELELGRIRSNAEDTLRSKEQAELEAARQRQLAAEEERRRREAEERVQKSLAAEEEAARQRKAALEEVERLKAKVEEARRLRERAEQESARQLQLAQEAAQKRLQAEEKAHAFAVQQKEQELQQTLQQEQSVLDQLRGEAEAARRAAEEAEEARVQAEREAAQSRRQVEEAERLKQSAEEQAQARAQAQAAAEKLRKEAEQEAARRAQAEQAALRQKQAADAEMEKHKKFAEQTLRQKAQVEQELTTLRLQLEETDHQKNLLDEELQRLKAEATEAARQRSQVEEELFSVRVQMEELSKLKARIEAENRALILRDKDNTQRFLQEEAEKMKQVAEEAARLSVAAQEAARLRQLAEEDLAQQRALAEKMLKEKMQAVQEATRLKAEAELLQQQKELAQEQARRLQEDKEQMAQQLAEETQGFQRTLEAERQRQLEMSAEAERLKLRVAEMSRAQARAEEDAQRFRKQAEEIGEKLHRTELATQEKVTLVQTLEIQRQQSDHDAERLREAIAELEREKEKLQQEAKLLQLKSEEMQTVQQEQLLQETQALQQSFLSEKDSLLQRERFIEQEKAKLEQLFQDEVAKAQQLREEQQRQQQQMEQERQRLVASMEEARRRQHEAEEGVRRKQEELQQLEQQRRQQEELLAEENQRLREQLQLLEEQHRAALAHSEEVTASQVAATKTLPNGRDALDGPAAEAEPEHSFDGLRRKVSAQRLQEAGILSAEELQRLAQGHTTVDELARREDVRHYLQGRSSIAGLLLKATNEKLSVYAALQRQLLSPGTALILLEAQAASGFLLDPVRNRRLTVNEAVKEGVVGPELHHKLLSAERAVTGYKDPYTGQQISLFQAMQKGLIVREHGIRLLEAQIATGGVIDPVHSHRVPVDVAYRRGYFDEEMNRVLADPSDDTKGFFDPNTHENLTYLQLLERCVEDPETGLCLLPLTDKAAKGGELVYTDSEARDVFEKATVSAPFGKFQGKTVTIWEIINSEYFTAEQRRDLLRQFRTGRITVEKIIKIIITVVEEQEQKGRLCFEGLRSLVPAAELLESRVIDRELYQQLQRGERSVRDVAEVDTVRRALRGANVIAGVWLEEAGQKLSIYNALKKDLLPSDMAVALLEAQAGTGHIIDPATSARLTVDEAVRAGLVGPEFHEKLLSAEKAVTGYRDPYTGQSVSLFQALKKGLIPREQGLRLLDAQLSTGGIVDPSKSHRVPLDVACARGCLDEETSRALSAPRADAKAYSDPSTGEPATYGELQQRCRPDQLTGLSLLPLSEKAARARQEELYSELQARETFEKTPVEVPVGGFKGRTVTVWELISSEYFTAEQRQELLRQFRTGKVTVEKVIKILITIVEEVETLRQERLSFSGLRAPVPASELLASGVLSRAQFEQLKDGKTTVKDLSELGSVRTLLQGSGCLAGIYLEDTKEKVSIYEAMRRGLLRATTAALLLEAQAATGFLVDPVRNQRLYVHEAVKAGVVGPELHEQLLSAEKAVTGYRDPYSGSTISLFQAMQKGLVLRQHGIRLLEAQIATGGIIDPVHSHRVPVDVAYQRGYFSEEMNRVLADPSDDTKGFFDPNTHENLTYRQLLERCVEDPETGLRLLPLKGAEKAEVVETTQVYTEEETRRAFEETQIDIPGGGSHGGSTMSLWEVMQSDLIPEEQRAQLMADFQAGRVTKERMIIIIIEIIEKTEIIRQQGLASYDYVRRRLTAEDLFEARIISLETYNLLREGTRSLREALEAESAWCYLYGTGSVAGVYLPGSRQTLSIYQALKKGLLSAEVARLLLEAQAATGFLLDPVKGERLTVDEAVRKGLVGPELHDRLLSAERAVTGYRDPYTEQTISLFQAMKKELIPTEEALRLLDAQLATGGIVDPRLGFHLPLEVAYQRGYLNKDTHDQLSEPSEVRSYVDPSTDERLSYTQLLRRCRRDDGTGQLLLPLSDARKLTFRGLRKQITMEELVRSQVMDEATALQLREGLTSIEEVTKNLQKFLEGTSCIAGVFVDATKERLSVYQAMKKGIIRPGTAFELLEAQAATGYVIDPIKGLKLTVEEAVRMGIVGPEFKDKLLSAERAVTGYKDPYSGKLISLFQAMKKGLILKDHGIRLLEAQIATGGIIDPEESHRLPVEVAYKRGLFDEEMNEILTDPSDDTKGFFDPNTEENLTYLQLMERCITDPQTGLCLLPLKEKKRERKTSSKSSVRKRRVVIVDPETGKEMSVYEAYRKGLIDHQTYLELSEQECEWEEITISSSDGVVKSMIIDRRSGRQYDIDDAIAKNLIDRSALDQYRAGTLSITEFADMLSGNAGGFRSRSSSVGSSSSYPISPAVSRTQLASWSDPTEETGPVAGILDTETLEKVSITEAMHRNLVDNITGQRLLEAQACTGGIIDPSTGERFPVTDAVNKGLVDKIMVDRINLAQKAFCGFEDPRTKTKMSAAQALKKGWLYYEAGQRFLEVQYLTGGLIEPDTPGRVPLDEALQRGTVDARTAQKLRDVGAYSKYLTCPKTKLKISYKDALDRSMVEEGTGLRLLEAAAQSTKGYYSPYSVSGSGSTAGSRTGSRTGSRAGSRRGSFDATGSGFSMTFSSSSYSSSGYGRRYASGSSASLGGPESAVA

SEQ ID NO: 73 - DNA, 13629 bp, Mus musculus
  CDS (1)..(13629)
atgtctcagcaccggctccgtgtgcccgagccggaaggcctgggtagcaagagaaccagctcagaggacaacctctacctggctgtgctcagagcctccgagggcaagaaagatgaacgagaccgtgtgcagaagaaaactttcaccaagtgggtcaacaaacaccttatcaaggctcagaggcacatcagtgacctgtacgaagacctccgtgatggccacaacctcatctccctgctggaagtcctctcaggagacagcctgccccgcgagaaagggaggatgcgcttccacaagctgcagaatgtgcagattgccctggactatctccgacatcgccaggtgaagttagtgaacatcagaaatgatgacattgctgacggcaaccccaagctgaccctcggcctcatctggacaatcatcctgcacttccagatctcagacattcaggtgagcggacagtcggaggacatgacagcaaaggagaagctgctgctgtggtcacagcgtatggtagagggctaccaaggcctgcgctgtgacaacttcaccaccagttggcgcgatggccgtctcttcaatgctatcatccaccggcacaagcccatgctcatagatatgaataaagtgtatcgacagaccaacctggagaacctagaccaggcattctcggtggcagagcgggacctgggagttacacggctcctggacccagaagatgtggacgtccctcagcctgatgaaaagtccatcatcacctatgtttcatccctgtacgatgctatgccccgcgtgcctggtgcacaggacggagtgagggccaatgagctgcagcttcgttggcaggagtaccgggagcttgtgttgctgctgctgcaatggatccggcaccacaccgctgcttttgaggagcgcaagttcccctccagctttgaagagattgagatcctatggtgccagtttttgaagttcaaggagacagaacttcctgccaaggaggcagacaaaaaccggtccaaagttatctaccagtctttggagggggcagtacaagcgggccagctcaagattccccctggctaccacccactagatgtggagaaggagtggggcaagctgcatgtggccatcctggagcgggagaagcaactgcgaagcgagtttgagaggctggagtgtcttcagcgcattgtgagcaagctacagatggaggctgggctgtgtgaggagcagctgaaccaggcggacgccctactgcagtcggatattcggctgctggcctcaggcaaggtggctcagcgagctggggaagtcgagagagacctggacaaggctgatggtatgatccggctgttgttcaatgatgtgcagacccttaaagatgggcggcatccacagggtgaacagatgtaccggagggtgtatcgtctgcatgagcgcctggtagccatccgcactgagtacaacctccggctgaaggcaggagtgggtgcccctgtgacccaggtgaccctgcagagtacacagaggcgcccagagctagaggactccacactgcgctacctgcaagacctgctggcctgggtagaggagaaccagcgtcgaatagacagtgctgagtggggcgtggacttgcccagtgtggaggcccagctgggcagccaccgaggcatgcatcagtctatagaggaatttcgggccaagatcgagcgggctcggaatgatgagagccagctctcccctgccacccggggtgcctaccgggactgcctaggtcgcctagacctgcagtatgcaaagctgctgaactcctccaaggcccgcctccggtccctggagagcttgcacgggtttgtggcggcagctaccaaggagctgatgtggctgaatgagaaagaagaggaggaagtgggctttgattggagtgaccgcaataccaacatggcagccaagaaagaaagttactcggccctgatgcgagaactggaaatgaaggaaaagaaaatcaaggagatccagaacacaggggacaggctgctgcgggaagaccatcctgcccggcccacggtggagtccttccaggctgccttgcagacacagtggagctggatgctgcagctgtgttgctgcattgaagcacacttgaaagagaatacagcctacttccagttcttctcagatgttcgggaggcggaggaacagttgcagaagctacaggagacgttacgcaggaagtacagctgtgaccgcaccatcaccgtcaccaggctcgaggatctgctgcaggatgcccaggatgagaaggaacaactgaatgagtacaaggggcacctctcaggcctggccaagcgggccaaggctattgtgcagttgaagccacgcaaccctgcccacccggtgcggggccacgtgcccctgatagccgtgtgtgactacaagcaggtggaggtgactgtgcacaagggtgaccaatgccagctggtgggtcctgcccagccatcccactggaaggtgctcagtggttccagcagcgaggccgctgtgccttctgtgtgctttcttgtgccgccgcccaaccaggaggcccaggaagctgtcgctagactggaggcgcagcatcaggccctggtcacactgtggcaccagcttcacgtggacatgaagagccttctggcgtggcagagcctcagtcgggacatacagctcatccggtcctggtccctagtcacgttccgcacactgaagcccgaggagcagcgacaagctctgcgcaacctggaattgcactaccaggccttccttcgagacagccaggatgccggtggctttgggcctgaggaccgtctagtggcagagcgcgagtatggatcttgcagccgccattaccagcagttactacaaagcctggagcagggtgagcaggaggagtcccgctgtcagcgatgcatctcggagctcaaggatatccggctgcagctggaggcctgtgagactcggactgtgcaccgtctgcggctgccactggataaggaccccgcacgggagtgcgcccagcgcatcgctgagcaacagaaagcgcaggctgaggtggaggggctgggcaagggagttgcccggctgtctgctgaggctgagaaagttctagccttgccagagccgtcacctgctgcacccactctgcgctcggagttggaactgaccctgggcaagctggaacaggtccgaagcctgtctgccatctacctggagaaactcaagaccatcagcttggtgattcgcagtacccagggggctgaggaggtgcttaaaacccatgaggagcagctgaaggaggcccaggctgtgcctgccactctccaagagcttgaagccaccaaggcctcactaaagaagctgcgggcccaggccgaggcacagcagccagtattcaacaccctaagagatgagttgcggggggcacaggaggttggtgagcggctacagcagcggcatggtgagcgggacgtagaagttgagcgctggcgagaacgtgtcactcagttgctggagcgctggcaggctgttctagcccagacagatgtgcggcagcgtgagctcgagcagctgggccgccagcttcgctactatcgtgagagcgcggatcctctgagcgcctggctgcaggatgccaagaggcggcaagagcagatccaggccgtgccaatagccaactgtcaggctgcgcgagaacagctgcgccaggagaaggccctgctggaggagattgagcgtcatggtgagaaggttgaggagtgccagaagtttgctaagcagtacatcaatgcaatcaaggactatgagctccagctgatcacgtacaaggctcagcttgaacccgtggcctcccctgccaagaagcccaaggttcagtctggatcggagagcgtcatccaggagtacgtggatctgcgcacgcgctacagcgagctgaccacgctcacgagccagtatatcaagttcatcagtgagacccttcgccgcatggaagaggaggagcggctggctgagcaacagcgggcagaggagcgggagcgactggccgaggtggaggctgcgctggagaagcagcggcagctagctgaggcacacgcccaggctaaggcccaggcagagctggaagcacaagaactgcagcggcgcatgcaggaggaggtggcgcggcgcgaggaggcagcagtggacgcacagcagcagaagcgcagcatccaagaggagctgcagcacctgaggcagagctcggaggcagagatccaggccaaggcccagcaggtggaggctgcagaacgcagccggatgcgcattgaggaagagatccgtgtagtacgtctgcagctggagacaactgagcggcagcgtggaggggcggagggcgagctgcaggctctgcgcgctcgggctgaggaggcagaagcgcagaagcggcaggctcaggaggaagctgaacgcttgcgaaggcaggtgcaggatgagagccagcgcaaacggcaggcagaggcagagctggccctgcgtgtgaaggctgaagctgaggcagcgcgagagaagcagagggccctgcaggccctggatgagctgagactgcaggccgaggaggccgagcggcggctgcgccaagccgaggcagagcgggcacgccaagtgcaggtggccctggagacggcacagcgcagtgcggaagtggagctgcagagcaagcgggcatcctttgcagagaagaccgcacaattggagcgcactctgcaggaggagcatgtaacagtggcccagctgcgggaggaggccgagcgacgggcacagcagcaagctgaggctgagcgagcccgggaggaagctgagcgggagctggagcgctggcagctgaaggccaatgaagcactgcggctgcggctgcaggcagaagaggtggcacagcagaagagcctggcacaggccgatgccgagaagcagaaggaagaggccgagcgggaagcgcggcggcggggcaaggcggaggagcaggctgtgcggcagcgggagctggcggagcaggagctggagaagcagcggcagctggcggagggcaccgcacagcagcgcctggctgcggagcaagagctgatccgcctgcgggccgagacagagcaaggtgagcagcagcggcagctgctggaggaagagctggcccggctacagcacgaggccaccgcagccacgcagaagcgccaggagctggaggctgaactggctaaggtccgggcagagatggaggtacttctggccagcaaggcgcgagccgaggaagagtctcgctctaccagcgaaaagtctaagcagaggctagaggctgaggcaggccgctttcgggaactggccgaggaggctgcccggctgcgtgctctggcggaggaggccaagaggcagaggcagttggcagaggaggatgccgcccgccagcgggccgaggcagagcgggtgcttactgagaagctggctgccatcagtgaggccacacggctcaagacggaggcagagattgcactcaaagagaaggaggccgagaatgagcgcctgaggcgcctggcagaagacgaggccttccagcggcggcgtctggaggagcaggcggcactgcacaaggctgacatcgaggagcgcctggcccagctgcgcaaggcatcagagagcgagctggagcggcagaagggcttggtggaggacaccctgcgacagcggcggcaggtggaggaggagatcatggcgctgaaggtgagctttgagaaagccgccgcgggcaaggcagagctggagctggagctggggcgcattcgcagcaacgcggaggacacaatgcgcagcaaggagcaggcggaactggaggcggcccggcagcggcagttggcggcagaggaggagcagaggcgccgggaggccgaggagcgcgtgcagaggagcctggcagcggaggaggaagccgctcggcagcgcaaggtggcactggaggaggtcgagcgactcaaggccaaggttgaagaagcacggcgcctgcgagagcgggcagagcaggagtcggccaggcagctgcagctggcccaggaggccgcccagaaacggctgcaggcggaggagaaggcacacgcctttgtggtgcagcagcgagaggaggagctgcagcagacgcttcagcaagagcagaacatgctggatcggctgcggagtgaggcagaggcagcgaggcgagccgccgaggaggcggaggaggcccgggagcaggcggagcgcgaggcagcgcagtctcggaaacaagtggaagaggccgagcggctgaaacagtcagcagaggagcaggctcaggcccaggctcaggcgcaggcggccgcagagaagctgcgcaaggaagcggagcaggaggcggcgcgtcgggcccaggcagagcaggcagcgctgaaacagaagcaggcagccgacgcggagatggagaagcataaaaagtttgcagagcagacactccggcagaaggcccaggtagagcaggagctgaccacactgaggctgcagctagaggagactgaccaccagaagagcatcctggatgaggagctgcagcgactaaaggccgaggtaacagaggcagcccggcagcgcagccaggtagaggaggagctcttctctgtccgtgtgcagatggaggagctgggcaagctcaaggctcgcattgaagctgaaaaccgggccctcatccttcgtgacaaggacaacacacagcgcttcctggaggaggaggccgagaagatgaaacaggtggccgaggaagcggcacggttgagcgtggccgcccaggaggcagcacggctgaggcagctagcggaggaggacctggcgcagcagcgggccctggcagagaagatgctgaaggagaagatgcaggcggtgcaggaagccacgaggctcaaggccgaggctgagctgctgcagcagcagaaggagcttgcccaggagcaggcccggcggctgcaggaggacaaggagcaaatggctcagcagttggtagaggagacacagggtttccagaggactctggaggccgagcggcagcggcagctggagatgagcgcggaggccgagcgcctcaagctgcgcatggttgagatgagccgggctcaggcccgcgcggaggaggacgcccagcgcttccggaagcaggctgaagagatcggcgagaagctgcaccgcactgaacttgcgacacaggagaaggtgacgttggtgcagacgctggagatccagcgacagcagagtgaccacgatgccgagcgtctgagggaggccattgcggagctggagcgtgagaaggagaagctcaagcaggaggcgaagttactgcagctcaagtcggaggagatgcagactgtgcagcaggagcagatactgcaggagacccaggccctgcagaagagcttcctctctgagaaggacagcctgctgcagcgcgagcgcttcatcgagcaggagaaggccaagctggagcagctcttccaggacgaggtggctaaagcaaagcagctgcgtgaggagcagcagcggcagcagcagcagatggaacaggaaaagcaggagctgatggccagcatggaggaggccaggaggcggcagcgcgaggctgaggagggcgtgaggcgcaagcaagaggaactgcagcatctggagcagcagcggcagcagcaggagaagctcctggcggaggaaaaccagcggctgcgagagcggctgcagcgcctggaggaagagcaccgcgctgccttggctcactctgagatcgccaccacccaggccgcttccacgaaggcactgcccaacggccgggatgcacccgatggcccgtccgtggaggctgaacccgagtacacctttgagggactacgtcagaaggtgccggcccagcagctacaggaagcaggcatcctgagccaggaggaactgcagcgtttggcacagggtcacaccacggtggctgagctcacgcagcgggaagatgtgtaccggtacctgaagggccgcagcagcattgcaggactgttactgaagcccaccaatgagaaactgagtgtctacacagccctacagcggcagctgctcagccccggaacagctctgatcttgctggaggcccaggcagcctcgggcttcctgctggatcctgtgcggaatcggcggctgacagtcaatgaggctgtgaaggagggtgtcgtgggtcctgagctgcaccacaaactgctgtcagctgagcgtgccgtcaccggctacaaggacccctatacaggggaacagatctcgctcttccaggccatgaagaaggaccttattgtcagggaccatggcgtccgcctgctggaggcccagatcgccaccggtggcatcattgatcctgtgcacagccaccgtgtgcctgtggacgtggcctacaaacgtggctacttcgatgaagagatgaaccgcatcttgtctgacccaagcgatgacaccaagggcttcttcgaccccaacacccacgagaacctcacttacctgcagctgctggagcgctgtgtggaggaccccgagaccggcctgcgcctcctgccactcacagataaggctgccaagggtggcgagctggtgtacaccgatacggaggcccgtgacgtcttcgaaaaggccaccgtgtctgcaccgtttggcaagttccagggcaggaccgtgaccatctgggagatcatcaactcggagtacttcacggcggaacagcgacgggacctgctgcagcagttccgcacgggccacatcacggtggagaaaatcatcaaaatcgtcatcacagtggtggaggaacacgagcggaagggccagctctgctttgagggcctccgtgccctcgtgcccgccgcagagctgctggacagtggggtcatcagccacgaactctaccagcagctgcagcggggtgagcgttctgtgcgggaagtggccgaggcggacagcgtgaggcaggccctgcggggtaccaatgtcatcgccggtgtgtggctggaagaagcagggcagaagctgagcatctatgaggccctgaagaaagacttgctgcagccagaggtggctgtggccttgctggaggcccaggctggcactgggcatatcatcgaccctgccaccagcgccaggctgactgtggacgaggcggtgcgtgctggcctggtggggcctgagctgcacgagaagctgctgtcagccgagaaggccgtgacaggctacagggatccctactcaggacagagtgtctcactgttccaggccttgaagaagggtctcatcccccgagaacagggcctgcgcctgctggatgcccagttatccactggtggcattgtagaccccagcaaaagccaccgtgtgcccctggatgttgcctatgcccggggctacctggacaaagagactaacagggccctgacgtcacccagagatgatgccagagtctaccatgaccccagcacccaggagccagtcacctacagccagctccaacagcggtgccggtctgaccagctgaccggcttgagcctactgccactctcagagaaggccgtccgggcccggcaggaggaggtctactctgagctccaggcccgggagacactggagcaggccaaggttgaggttcctgtgggcagctttaagggcagggcgatgactgtgtgggagctcatcagctctgaatactttactgaggagcagcggcaggagttgctgcggcagttccgcacaggcaaggtcaccgtggagaaggtcatcaagattgtcatcaccatcgtggaggaggtggagactcggcggcaggagagactgtcctttagtggcctccgtgcccctgtgccggccagtgagctcctggacgccaagatcctcagcagagctcagtttgaccagctcaaggatggcaagacatcagtcaaagagctgtccgaggtgggctccgtgcggactctgctgcagggcagcggctgcctggccggcatctatctggaggactcgaaggagaaagtaaccatctatgaggccatgcgccggggcctcctcagacccagcacagccacgctcctgctggaggcccaggcagccactggtttcctggtggaccctgtgcggaaccaacgtctgtatgtccatgaggctgtcaaggcgggcgtagtgggccctgaactccatgagaagctgctgtcggccgagaaggccgtcactggctacaaggatccctactcgggcaacaccatctcgctgttccaggccatgaaaaagggcctggtcctcagggaccatgccatccgcctgctggaggcccaggtcgccacgggtggcatcatcgacccggtgcacagccaccgcctgcctgtggacgtggcctaccagcgtggctacttcgatgaggagatgaaccgtgtgctggcagatccaagtgatgacaccaagggcttctttgaccccaacacccacgagaacctcacctacctgcagctgctggagcgctgtgtggaggaccccgagaccggcctgcgcctcctgccactcaaaggggcagagaagaccgaggtggtagaaaccacacaggtgtatactgaggaggagactcggagggcgttcgaggagacgcagattgacatcccgggtggtggcagccacggtggctcctccatgtctctgtgggaggtgatgcagtcaaacatgatcccggaggatcagcgtgcccggctcatggctgactttcaggctgggagggtaaccaaggaacgcatgatcattatcatcatcgaaatcatcgagaagaccgagatcatccgccagcagaacctggcctcctatgactacgtgcgccgccgcctcactgccgaagacctgtacgaggcccggatcatctcccttgagacctacaacctcttccgggaaggcaccaagaacctccgtgaagtgctggagatggaatctgcctggcgctacctttacggcacaggcgcggtggccggtgtctacctgcctggctccaggcagacgctaaccatctaccaggcccttaagaaggggttgctgagtgccgaggtggcccgcttattgctggaagcacaggcagccacgggcttcctgctggacccagtgaagggggagcggctgaccgtggatgaggctgtgcggaagggcctggtaggccccgagctgcatgaccgcctcctctctgccgagcgagctgtaactggttaccgagacccctacacggaacagaccatctcactcttccaggccatgaagaaggagctgatccctgctgaggaggcgctgaggctgctggatgcgcagctagccacaggaggcattgtggacccccgcctgggtttccacctccctctggaggtggcttaccaacgcggctacctcaataaggacacgcacgaccagctgtcggagcccagcgaggtgcgcagctacgtggacccctccacggatgagcggctcagctacacacagctgctcaagcgttgccgccgtgatgaccccagcggccagatgctgctgctgctctctgatgcccgcaagctgaccttccgcggtctccgcaagcagatcactgtggaggagctggtacgctctcaagtcatggacgaggccacagcgctacagctacaagaaggcctgacctccatcgaggaggtcactaagaacctgcagaagttcctcgagggtaccagctgcattgccggagtctttgttgatgccaccaaggaacggctctcggtgtaccaggctatgaagaagggcatcatccgccccgggacagcctttgagctcctggaagcacaggcagccaccggctatgtcattgaccccatcaagggactcaagctgacggtggaagaagccgttcgtatgggtattgtgggccccgagttcaaggacaagctgctgtcagctgagcgtgccgtcactggctacaaggacccctactctgggaaactcatctccctcttccaggccatgaagaagggcctgatcctgaaggaccatggcatccgtctgctggaggctcagatcgccactgggggcatcattgaccccgaggagagccaccgtttgcctgtggaagtggcctataagcgcggcctctttgatgaggagatgaacgagatcttgactgatccctcagatgacaccaagggtttctttgaccccaacacagaggagaacctcacttacctgcagctgatggagcgctgcatcactgacccccagacgggcctgtgtctcctgcccctgaaggagaagaagcgggaacggaagacatcctccaagtcctcagtgcgcaagcgccgcgtggtgattgtggacccagagacgggcaaggagatgtctgtgtacgaggcctaccgcaagggtctcattgaccaccagacgtacctggagttgtcggagcaggagtgtgagtgggaagagatcaccatctcctcctcagatggcgtcgtcaagtctatgatcatcgaccgccgctctggtcgccagtatgacatcgacgacgccatcaccaagaacctcattgaccgctcagcactggaccagtaccgcgctggtacgctttcgatcactgagtttgctgacatgctctcaggcaatgccggtggcttccgttcccgctcctcctctgtgggctcatcttcctcctaccccatcagttctgctggccccaggacccagctagcctcctggtctgatccgactgaggagactggccccgtggccggcatcctggacacagagactctggagaaggtgtccatcacggaggccatgcaccgcaacctggtagacaacatcaccggccagcggctgctggaggcccaagcctgcaccgggggcatcattgaccccagcactggtgagcgcttcccggtcactgaagctgtcaacaagggcctggtggacaagatcatggtagaccgtatcaatctggcccagaaggccttctgtgggtttgaggacccacgcaccaagaccaagatgtcagctgcccaggccctgaagaagggctggctgtactatgaggcaggccagcgtttcctggaggtgcagtacctgaccggtggtctgatcgagcctgacacgcccggccgtgtgtctctcgacgaagctctgcaacgtggcactgtggatgcccgcacagcccagaagctgcgtgatgtcagtgcttactccaagtacctcacgtgccccaagaccaagctcaagatctcctacaaggacgctctggaccgtagcatggtggaggagggcacggggctgaggctgctggaggctgcggcacagtccagcaagggctactacagcccgtacagcgtcagtggctctggctcgaccgccggctcacgcactggttcacgcaccggctccagggccggctcccggcgtggcagctttgatgccactggctctggcttctccatgaccttttcttcttcctcctactcttcctcaggctatggccgccgctatgcctcagggccttcagcctctcttgggggccctgagtctgcagtggcc

SEQ ID NO: 74 - protein, 4543 aa, Mus musculus
MSQHRLRVPEPEGLGSKRTSSEDNLYLAVLRASEGKKDERDRVQKKTFTKWVNKHLIKAQRHISDLYEDLRDGHNLISLLEVLSGDSLPREKGRMRFHKLQNVQIALDYLRHRQVKLVNIRNDDIADGNPKLTLGLIWTIILHFQISDIQVSGQSEDMTAKEKLLLWSQRMVEGYQGLRCDNFTTSWRDGRLFNAIIHRHKPMLIDMNKVYRQTNLENLDQAFSVAERDLGVTRLLDPEDVDVPQPDEKSIITYVSSLYDAMPRVPGAQDGVRANELQLRWQEYRELVLLLLQWIRHHTAAFEERKFPSSFEEIEILWCQFLKFKETELPAKEADKNRSKVIYQSLEGAVQAGQLKIPPGYHPLDVEKEWGKLHVAILEREKQLRSEFERLECLQRIVSKLQMEAGLCEEQLNQADALLQSDIRLLASGKVAQRAGEVERDLDKADGMIRLLFNDVQTLKDGRHPQGEQMYRRVYRLHERLVAIRTEYNLRLKAGVGAPVTQVTLQSTQRRPELEDSTLRYLQDLLAWVEENQRRIDSAEWGVDLPSVEAQLGSHRGMHQSIEEFRAKIERARNDESQLSPATRGAYRDCLGRLDLQYAKLLNSSKARLRSLESLHGFVAAATKELMWLNEKEEEEVGFDWSDRNTNMAAKKESYSALMRELEMKEKKIKEIQNTGDRLLREDHPARPTVESFQAALQTQWSWMLQLCCCIEAHLKENTAYFQFFSDVREAEEQLQKLQETLRRKYSCDRTITVTRLEDLLQDAQDEKEQLNEYKGHLSGLAKRAKAIVQLKPRNPAHPVRGHVPLIAVCDYKQVEVTVHKGDQCQLVGPAQPSHWKVLSGSSSEAAVPSVCFLVPPPNQEAQEAVARLEAQHQALVTLWHQLHVDMKSLLAWQSLSRDIQLIRSWSLVTFRTLKPEEQRQALRNLELHYQAFLRDSQDAGGFGPEDRLVAEREYGSCSRHYQQLLQSLEQGEQEESRCQRCISELKDIRLQLEACETRTVHRLRLPLDKDPARECAQRIAEQQKAQAEVEGLGKGVARLSAEAEKVLALPEPSPAAPTLRSELELTLGKLEQVRSLSAIYLEKLKTISLVIRSTQGAEEVLKTHEEQLKEAQAVPATLQELEATKASLKKLRAQAEAQQPVFNTLRDELRGAQEVGERLQQRHGERDVEVERWRERVTQLLERWQAVLAQTDVRQRELEQLGRQLRYYRESADPLSAWLQDAKRRQEQIQAVPIANCQAAREQLRQEKALLEEIERHGEKVEECQKFAKQYINAIKDYELQLITYKAQLEPVASPAKKPKVQSGSESVIQEYVDLRTRYSELTTLTSQYIKFISETLRRMEEEERLAEQQRAEERERLAEVEAALEKQRQLAEAHAQAKAQAELEAQELQRRMQEEVARREEAAVDAQQQKRSIQEELQHLRQSSEAEIQAKAQQVEAAERSRMRIEEEIRVVRLQLETTERQRGGAEGELQALRARAEEAEAQKRQAQEEAERLRRQVQDESQRKRQAEAELALRVKAEAEAAREKQRALQALDELRLQAEEAERRLRQAEAERARQVQVALETAQRSAEVELQSKRASFAEKTAQLERTLQEEHVTVAQLREEAERRAQQQAEAERAREEAERELERWQLKANEALRLRLQAEEVAQQKSLAQADAEKQKEEAEREARRRGKAEEQAVRQRELAEQELEKQRQLAEGTAQQRLAAEQELIRLRAETEQGEQQRQLLEEELARLQHEATAATQKRQELEAELAKVRAEMEVLLASKARAEEESRSTSEKSKQRLEAEAGRFRELAEEAARLRALAEEAKRQRQLAEEDAARQRAEAERVLTEKLAAISEATRLKTEAEIALKEKEAENERLRRLAEDEAFQRRRLEEQAALHKADIEERLAQLRKASESELERQKGLVEDTLRQRRQVEEEIMALKVSFEKAAAGKAELELELGRIRSNAEDTMRSKEQAELEAARQRQLAAEEEQRRREAEERVQRSLAAEEEAARQRKVALEEVERLKAKVEEARRLRERAEQESARQLQLAQEAAQKRLQAEEKAHAFVVQQREEELQQTLQQEQNMLDRLRSEAEAARRAAEEAEEAREQAEREAAQSRKQVEEAERLKQSAEEQAQAQAQAQAAAEKLRKEAEQEAARRAQAEQAALKQKQAADAEMEKHKKFAEQTLRQKAQVEQELTTLRLQLEETDHQKSILDEELQRLKAEVTEAARQRSQVEEELFSVRVQMEELGKLKARIEAENRALILRDKDNTQRFLEEEAEKMKQVAEEAARLSVAAQEAARLRQLAEEDLAQQRALAEKMLKEKMQAVQEATRLKAEAELLQQQKELAQEQARRLQEDKEQMAQQLVEETQGFQRTLEAERQRQLEMSAEAERLKLRMVEMSRAQARAEEDAQRFRKQAEEIGEKLHRTELATQEKVTLVQTLEIQRQQSDHDAERLREAIAELEREKEKLKQEAKLLQLKSEEMQTVQQEQILQETQALQKSFLSEKDSLLQRERFIEQEKAKLEQLFQDEVAKAKQLREEQQRQQQQMEQEKQELMASMEEARRRQREAEEGVRRKQEELQHLEQQRQQQEKLLAEENQRLRERLQRLEEEHRAALAHSEIATTQAASTKALPNGRDAPDGPSVEAEPEYTFEGLRQKVPAQQLQEAGILSQEELQRLAQGHTTVAELTQREDVYRYLKGRSSIAGLLLKPTNEKLSVYTALQRQLLSPGTALILLEAQAASGFLLDPVRNRRLTVNEAVKEGVVGPELHHKLLSAERAVTGYKDPYTGEQISLFQAMKKDLIVRDHGVRLLEAQIATGGIIDPVHSHRVPVDVAYKRGYFDEEMNRILSDPSDDTKGFFDPNTHENLTYLQLLERCVEDPETGLRLLPLTDKAAKGGELVYTDTEARDVFEKATVSAPFGKFQGRTVTIWEIINSEYFTAEQRRDLLQQFRTGHITVEKIIKIVITVVEEHERKGQLCFEGLRALVPAAELLDSGVISHELYQQLQRGERSVREVAEADSVRQALRGTNVIAGVWLEEAGQKLSIYEALKKDLLQPEVAVALLEAQAGTGHIIDPATSARLTVDEAVRAGLVGPELHEKLLSAEKAVTGYRDPYSGQSVSLFQALKKGLIPREQGLRLLDAQLSTGGIVDPSKSHRVPLDVAYARGYLDKETNRALTSPRDDARVYHDPSTQEPVTYSQLQQRCRSDQLTGLSLLPLSEKAVRARQEEVYSELQARETLEQAKVEVPVGSFKGRAMTVWELISSEYFTEEQRQELLRQFRTGKVTVEKVIKIVITIVEEVETRRQERLSFSGLRAPVPASELLDAKILSRAQFDQLKDGKTSVKELSEVGSVRTLLQGSGCLAGIYLEDSKEKVTIYEAMRRGLLRPSTATLLLEAQAATGFLVDPVRNQRLYVHEAVKAGVVGPELHEKLLSAEKAVTGYKDPYSGNTISLFQAMKKGLVLRDHAIRLLEAQVATGGIIDPVHSHRLPVDVAYQRGYFDEEMNRVLADPSDDTKGFFDPNTHENLTYLQLLERCVEDPETGLRLLPLKGAEKTEVVETTQVYTEEETRRAFEETQIDIPGGGSHGGSSMSLWEVMQSNMIPEDQRARLMADFQAGRVTKERMIIIIIEIIEKTEIIRQQNLASYDYVRRRLTAEDLYEARIISLETYNLFREGTKNLREVLEMESAWRYLYGTGAVAGVYLPGSRQTLTIYQALKKGLLSAEVARLLLEAQAATGFLLDPVKGERLTVDEAVRKGLVGPELHDRLLSAERAVTGYRDPYTEQTISLFQAMKKELIPAEEALRLLDAQLATGGIVDPRLGFHLPLEVAYQRGYLNKDTHDQLSEPSEVRSYVDPSTDERLSYTQLLKRCRRDDPSGQMLLLLSDARKLTFRGLRKQITVEELVRSQVMDEATALQLQEGLTSIEEVTKNLQKFLEGTSCIAGVFVDATKERLSVYQAMKKGIIRPGTAFELLEAQAATGYVIDPIKGLKLTVEEAVRMGIVGPEFKDKLLSAERAVTGYKDPYSGKLISLFQAMKKGLILKDHGIRLLEAQIATGGIIDPEESHRLPVEVAYKRGLFDEEMNEILTDPSDDTKGFFDPNTEENLTYLQLMERCITDPQTGLCLLPLKEKKRERKTSSKSSVRKRRVVIVDPETGKEMSVYEAYRKGLIDHQTYLELSEQECEWEEITISSSDGVVKSMIIDRRSGRQYDIDDAITKNLIDRSALDQYRAGTLSITEFADMLSGNAGGFRSRSSSVGSSSSYPISSAGPRTQLASWSDPTEETGPVAGILDTETLEKVSITEAMHRNLVDNITGQRLLEAQACTGGIIDPSTGERFPVTEAVNKGLVDKIMVDRINLAQKAFCGFEDPRTKTKMSAAQALKKGWLYYEAGQRFLEVQYLTGGLIEPDTPGRVSLDEALQRGTVDARTAQKLRDVSAYSKYLTCPKTKLKISYKDALDRSMVEEGTGLRLLEAAAQSSKGYYSPYSVSGSGSTAGSRTGSRTGSRAGSRRGSFDATGSGFSMTFSSSSYSSSGYGRRYASGPSASLGGPESAVA

SEQ ID NO: 75 - DNA, 3120 bp, Bos taurus
  CDS (1)..(3120)
atgggggaggcggaggcggaggtgggagccgcagtggagctcagtggtctgcccaccagcatcccagacgagctgctcactctctacttcgagaaccgccgaagctctgggggtgggcctgtggcgagttggcagagactcggccgcgggggcatcctcacctttgaggagcctgcagatgccgcgagggtcctggcctggccggagcacactctgcagggggctcggctgagcctgcggccagccccaccacgcgcctctgcgcgcctgctgctccaaggattgcctcctggcaccacaccccagctactggagcagtatgtccaagctctgctttgtgccaccgggcacccggagcagccttgccacgcgctggccagtccccgaccagatcgcgccctggtgcaactgcccaagcccctttctgaggcagaagctggagtcctggaggtgcactcccgggccctgggcctggagggggctgaggtctccctggcctgggtgccccaggcccgggcagtgcgtgtggtaggaggcgacccccctgcagacctgctgctgctggagctgtacctggagaatgagcgccgcagcggcggggggcccctggagggcatgcacagccttccagggcacctgggcaccgtggtctccttccagcactggcgtgtggccgagcgggtgctgcagcgggaccaccggctgcagggctcagagctgaaacttgtccctcactacgatgtcctggagcctgaggagcttgctgaggacgctggtgaaggaagctgcccgggcgacctggggcctggggcccccaggcacgttctccaggaggcaggaggaccagcaagggaacagcattatgctggggatgtcacactgggctctgaggaggcgccagggcagtcaggagcctctctgagcacaggccctcaatgggacagctcgtcgctggcaccggctgggccagtcagctcagggccctgggggtcttcagaagaggagggactggggagccgaaggactgtggggtctccggacccagtggagatcgccatgcgctcttcagagcaggtggcgtcagtgagccaggggcccgcggggtcaccggggcagcagggcctggtggagatggtgctggcaatggagccgggagcaatgcgcttcattcagctctatcatgaggaccttctcaccggcctgggagatgtggccctcttcccactcgagggctcagatacgactggattccggctctgcggagccctggccccatgccgggcagccaaggagtttctgcaaagtctgctgggcagcgttagctgtcacatgctgagcctgaagcacccaggcagtgccaggttcctgctgagcccagaggggcagcaccttctccgggagctggaggcacagttccagtgcgtcttcaggacagagcatctggctggggccgtcctggacatggacctggaagaggtgggccccactgaggccctgcaggccctccctggcctctcctccaccccttggcctccagacgatccggaccgtgaccaggagaactcaggcctggaggaggtccgagagctgctggccactctggagggcctggatggggaagactggctgccgctggagctaggggaggaggagcctgaggggcagccagaggaggaggtgacaatccccagatctggggaggagcccttggcccccagcacaagagagcctgggtggctacaggaggaagctgagctacagctggcgctctaccggtccctgcagccgcggggccaggcagccgagcaggaggaggccgagctgcagcaggccctggccctctccctgctggagccgccccccctgagtggggagcaggagctcctctggggccagggcccaggtggctgggcccagctggaggtgcacgcctccttcgagcgggatatggacgagctggaccgggccttggaggccgccttggaggtgcacctcagggaggagctggtgggggccccgggctgtgtgctgcccgccgagctgtgcgcccgcctggagcggtgccatggcgtgagtgttgccctgcacggtggccacatcgtcctccgtggctttggggtccagcctacccacgcggcccatcacctggcggcgctgctggctggcccccgggatcagagctcagcctttcccttggcggcttcctgctccacacgtgaaggcccgaaggagcccctgggcaggctggagcgtctcgctgagagcagcagtgagttccaagcggtggtgcaggccttctgtgacacactggacacggcccacggcaggatccacgtggtgcgggtggagcgcgtgctacacccgctgctgcagcagcagtacgagctgcaccgggagcgcctggagcagtgctgtgagcggccggccgagcaggtcctgtaccacggcacagcgatgcccaccgtccccgacatctgcgcgcacggcttcaaccgcagcttctgcggccgcaatgcccagtccctccaggacggagccccgttcacctcctgcacgcccgcgcgtggggcccgggcgctgaggggcgtgcgcgcgtcggtgccggaggccatgtcgggcgaggaccaggaggttcgggcagtggttgaggatggctccaacgggggcagtggctcgcccagccctggggacacgctgccctggaacctggagaaaacccagcggagccggcgaggtggaggtggccccggaggaaatgggagtgtcttggaccctgccgaaagagcagtcatccgcattgcagccaagatcctgcctggcctccaggagctgccatcctggaggaggaaggggaaggtccggggcaaggaccctgaccgtgtgggctggcagcagacagcggctgcgccctctgggaactcggaccccggcgctgacagcccccccaccccatccctccgtgccgtcccgcgagccctggaagccgcgggcttctggacacggggtgcgcagcgtttccagctggaggaacgctgccggggcgttccgggggagggcgtttctcagccctgggagatggggcttgccaatctgatgggtggcaaagacattgtcttttaa

SEQ ID NO: 76 - protein, 1039 aa, Bos taurus
MGEAEAEVGAAVELSGLPTSIPDELLTLYFENRRSSGGGPVASWQRLGRGGILTFEEPADAARVLAWPEHTLQGARLSLRPAPPRASARLLLQGLPPGTTPQLLEQYVQALLCATGHPEQPCHALASPRPDRALVQLPKPLSEAEAGVLEVHSRALGLEGAEVSLAWVPQARAVRVVGGDPPADLLLLELYLENERRSGGGPLEGMHSLPGHLGTVVSFQHWRVAERVLQRDHRLQGSELKLVPHYDVLEPEELAEDAGEGSCPGDLGPGAPRHVLQEAGGPAREQHYAGDVTLGSEEAPGQSGASLSTGPQWDSSSLAPAGPVSSGPWGSSEEEGLGSRRTVGSPDPVEIAMRSSEQVASVSQGPAGSPGQQGLVEMVLAMEPGAMRFIQLYHEDLLTGLGDVALFPLEGSDTTGFRLCGALAPCRAAKEFLQSLLGSVSCHMLSLKHPGSARFLLSPEGQHLLRELEAQFQCVFRTEHLAGAVLDMDLEEVGPTEALQALPGLSSTPWPPDDPDRDQENSGLEEVRELLATLEGLDGEDWLPLELGEEEPEGQPEEEVTIPRSGEEPLAPSTREPGWLQEEAELQLALYRSLQPRGQAAEQEEAELQQALALSLLEPPPLSGEQELLWGQGPGGWAQLEVHASFERDMDELDRALEAALEVHLREELVGAPGCVLPAELCARLERCHGVSVALHGGHIVLRGFGVQPTHAAHHLAALLAGPRDQSSAFPLAASCSTREGPKEPLGRLERLAESSSEFQAVVQAFCDTLDTAHGRIHVVRVERVLHPLLQQQYELHRERLEQCCERPAEQVLYHGTAMPTVPDICAHGFNRSFCGRNAQSLQDGAPFTSCTPARGARALRGVRASVPEAMSGEDQEVRAVVEDGSNGGSGSPSPGDTLPWNLEKTQRSRRGGGGPGGNGSVLDPAERAVIRIAAKILPGLQELPSWRRKGKVRGKDPDRVGWQQTAAAPSGNSDPGADSPPTPSLRAVPRALEAAGFWTRGAQRFQLEERCRGVPGEGVSQPWEMGLANLMGGKDIVF

SEQ ID NO: 77 - DNA, 14058 bp, Canis familiaris
  CDS (1)..(14058)
atggtggcggggatgctcatgccgcgggaccagctgcgggccgtctacgaggtgctcttccgagaaggcgtcatggtggcaaagaaggatcggcggccccgcagcctgcaccctcacgtccctggcgtcaccaacctgcaggtcatgcgcgccatggcctccctgcgggcccggggcctggtgcgagagaccttcgcctggcgccacttctactggtacctcaccaatgagggcatcgcccacctacgccagtacctgcacctgccgccggagatcgtgcctgcctctctgcagcgcgtgcgccgccctgtcgccatggtgatgcccgcgcgccgcatcccccacgtgcagtctgtgcagggtcctctgagctgcccgccaaagtgggggccggtgccaactgaggaccctgcccatgaggagcggcgggtctaccgtcggaaggagcctgaggagggagcatctgagccccctgtggtgcctgctaccaccccggggaacctggcgaggcctggcccgaagcctgccccagccacagatgaacgggatcgtgtgcagaagaaaaccttcaccaagtgggtgaacaaacacctcatcaaggcccagagacacatcagtgacctgtatgaagacctccgcgatggccacaacctcatctccctgctggaggtgctctcgggggacagcctgccccgggagaagggcaggatgcgcttccataagctgcagaacgttcagatcgccctggactacctccgacaccgccaggtgaagttggtgaacatcaggaatgatgacatcgcggatggcaaccccaagctgacccttggcctgatctggacaatcatcctgcacttccagatctcggacatccaggtgagcgggcagtcagaggacatgacggccaaggagaagctcctgctgtggtcacagcgcatggtggagggctaccagggcctgcgctgtgacaacttcacttccagctggcgtgacggtcgcctcttcaacgccatcattcaccggcacaggcccatgctcatcgacatgagcaaggtgtatcgtcagaccaacctggagaacctagaccaggccttctccgtggcagagcgggacctgggcgtgacccggctcctggaccctgaggatgtggatgtccctcagcctgacgagaagtccatcatcacctacgtctcctccttgtacgacgcgatgccccgagtacctgacgtgcaggatggggtgaaggccaacgagctgcagctgcgctggcaggagtaccgggagctggtggtgctgctgctgcagtggatgcggcaccacactgccgccttcgaggagcacaggttcccgtccagctttgaagagatcgagattttgtggtgccagttcttgaaatttaaggagacggagcttccggccaaggaggcagacaagaaccggtccaagggcatctaccagtccctggagggtgcggtgcaagcaggccagctcaaggtgccccccggctaccaccccctggatgtggagaaggagtggggcaagctgcatgtggccatcctagatcgggagaagcagctccggagcgaatttgagaggctggagtgtcttcagcgcatcgtgagcaaactgcagatggaggctgggctgtgtgaggagcagctgaaccacgccgacgccctgcttcagtcggacgtgcggctgctggctgcgagcaaggctccacagcgggcggccgaggtggagcgggaccttgacaaggcagatggcatgatccggctgctgttcaacgatgtgcagaccctcaaggatgggcggcacccgcagggagagcagatgtaccgcagagtgtaccgcctgcacgagcgcttggtggccatccgaaccgagtacaacctccggctaaagtccggcgtagctgcccccgtgacccaggtgactatgcagaccacgcagaggcgccctgagctcgaggatgccacgctgcgctacctgcaggacctgctggcctgggtggaggagaaccagcgccgggtggacagtgccgagtggggcggggacctgcccagtgtggaagcgcagctgggcagccaccgtggcctgcaccagtccattgacgagttccgggccaagattgagcgggcgcgggctgatgagggccagctctcccctgccccccggggcacctacagggactgcctgggccggcttgacctgcagtacgccaagctgctgaactcctctaaggcccgtctgcggtccctggagagcctgcacggctttgtggcggctgccaccaaggagctgatgtggctcagtgagaaggaggaggaggaggtgggcttcgactggggggagcacaactctaacatggccgccaagaaggagagctactcggctctgatgcgcgagctggaggtgaaggaaaagaagatcaaggagattcagagcaccggggaccggctgctgcgggaggggcaccctgcccggcctacagtggagtccttccaggccgccctgcagacccagtggagctggatgcttcagctgtgctgctgcatcgaggcgcacctgaaagagaacaccgcctacttccagttcttctcggacgtgcgggagactgaggaacagctccggaagctgcaggagatgctgcgcaggaagtatatctgtgaccgctccatcaccgtcacgcgcctggaggacctgctacaggatgcccaggatgagaaggagcagctgaacgagtacagggcacacctgtcagggctggccaagcgggccaaggctgtcgtgcagctgaagccccgagaccaggcccagcctgtgcggggtctcgtgccgctgcaggctgtgtgtgactacaagcaggtggaggtgactgtgcacaagggtgaccagtaccagctgctgggccccgcacagcccgcgcactggaaggtgctcagcagctctggcagtgaggccgccgtgccctctgtgtgtttcctcgtgcctccgcccaaccaggaggcccaggaggccgtcagcaggctggaggcccagcaccaggccctggtcgcgctgtggcaccagctgcacgtggacatgaagagtctcctggcatggcagtgcctcagcagggacgtgcagctcatccgctcctggtccttggtcacgttccggacgctgaagcccgaggagcaacgccaagccctgcgcagcctggagcttcactaccaggccttcctgcgggacagccaggatgctgggggctttgggcctgaggaccggctgcaggccgagcgcgagtacggctcctgcagccggcactaccagcagctgctgcagagcgcggagcagggtgcacaggaggagtcccgctgccagcgctgcatctctgagctcaaggacatccggctgcagctggaggcctgcgagacccgcaccgtgcaccgcctgcggctgccgctggacaaagagcccgcgcgagagtgtgcgcagcgcatcgccgagcagcagaaagcacaagctgaggtggaaggactaggcaagggtgtcgcccggctctctgcggaggccgagaaggtcctggccctgcccgagccgtcacctgccgcccccaccctgcgctcagagctggagctgaccctgggcaagctggagcaggtccgcagcctgtctgccatttacctggagaagctcaagaccatcagtctggtgatccgcagcacgcagggggctgaggaggtgctcagggcccacgaggagcagctcaaggaggcccaggctgtgcctgccacccttccggatcttgaggccaccaaggctgcgctgaagaagctgcgggtccaggcggaagcacagcagcccgtgtttgatgccctgcgggacgagctgcggggggctcaggaggtgggggagcggctgcagcggcagcacggcgagcgggacgtggaggtggagcgctggcgagagcgggtcgcacccctgctggagcgctggcaggctgcactggcccagaccgacgtgaggcagcgcgagctcgagcagctgggccgccagctccgctactaccgcgagagcgcggacccgctgggcacctggctgcaggacgccaagcagcggcaggagcggatccaggccgtgccgctagccaacagccaggccgtgcgggagcagctgcagcaggagaaggagctgctggaggagatcgagcggtatggcgagaaggtggatgagtgccagcagctggccaagcagtacattaatgccatcaaggactacgagcttcaactggtcacgtataaggcgcagctggagccagtggcctccccagccaagaagcccaaggtccagtccgggtctgagagcgtcatccaggagtatgtggacctgcgcacgaggtacagcgagctcaccacgcttacaagtcagtacatcaagttcatccgcgagaccctgcggcgcatggaggaggaggagaggctggctgagcagcagcgggcagaggagcgggaacggctggccgaggtggaggccgcgctggagaagcagcggcagttggccgaggcccacgcgcaggcgaaggcgcaggccgagcgggaggcagaggagctgcagcggcgcatgcaggaggaggtggcacggcgggaggaggccgcggtggacgcacagcagcagaagcggagcattcaggaggagctgcagcacttgcggcagagctcggaggccgagatccaggccaaggcccggcaggtggaggccgcagaacgcagccgggtgcgcatcgaggaggagatccgcgtggtccgcctgcagctggaggccactgagcgccagcggggcggggccgagggcgagctgcaggccctacgtgcgcgggcggaagaggccgaggcgcagaagcggcaggcacaggaggaggcggagcgcttgcggcggcaggtgcaggacgagagccagcgcaagcggcaggcagaggcggagctggccctgcgcgtgaaggccgaggccgaggcggcccgagaaaagcagcgggccctgcaggcgctcgaggacgtgcggctccaggccgaggaggcggagcggcgcctgcggcaggcggaggccgaccgggcccgccaggtgcaggtggccctggagacggcgcagcgcagcgcagaggtggagctgcagagcaagcgcgcctccttcgccgagaagactgcgcagctggagcgcacgctgcaggaagagcacgtggccgtggcacagctgcgcgaggaggcggagcggcgggctcagcagcaggcggaggccgagcgcgcccgggaggaggcggagcaggagctggagcgctggcggctgaaggccaacgaggcactgcgcctgcggctgcaggcggaagaggtggcccagcagaagagcctggcgcaggctgaggccgagaagcagaaggaggaggcggagcgggaggcgcggcgccggggcaaggcggaggagcaggccgtgcggcagcgggagctggccgagcaggagctggagaagcagcggcagctggcagagggcaccgcgcagcagcgcctggtggcggagcaggagctgatccggctgcgggccgagacggagcagggggagcagcagcggcagctgttggaggaggagctggcgcgcctgcagcgggaggcggccgcagccacgcacaagcgccaggagctggaagccgagctggccaaggtgcgggctgagatggaggtgctgctggccagcaaggcgcgcgcagaggaggagtcccgctccaccagcgagaagtccaagcagaggctggaggccgaggccagccggttccgcgagctggccgaggaggccgcccgcctgcgtgccctggctgaggagaccaagcggcagcggcagctggccgaggaggatgcggcccggcagcgggcggaggcggagagggtactggccgagaagctggccgccatcagcgaggccacgcggctcaagaccgaggccgagatcgccctcaaggagaaggaggcggagaatgagcgtctgcggcggctggcggaagacgaagccttccagcggcggcggctggaggagcaggccgcccagcacaaggcggacatcgaggagcggctggcgcagctgcgcaaggcgtcagagaacgagctggagcggcagaaggggctggtggaggacacgctgcggcagcggcggcaggtggaggaggagatcctggccctgaaggcgagcttcgagaaggcagctgccggcaaggcggagctggagctggagctcgggcgcatccgcagtaacgccgaggacacactgcgcagcaaggagcaggctgagctggaggccacgcggcagcggcagctggcggctgaggaggagcagcggcgccgcgaggccgaggagcgcgtgcaaaagagcctggctgctgaggaggaggccgcgcggcagcgcaagtctgccctggaggaggtggagcggctcaaggccaaggtggaggaggcccggcgcctgcgtgagcgagcggagcaggagtcggctcggcagctacaactggcccaggaggccgcccagaagcggctgcaggccgaggagaaggcgcacgccttcgccgtgcagcagaaggaacaggagctgcagcagacactccagcaggagcagagcatgctggagcggctgcgggccgaggcggaggcggcgcggcgggcggccgaggaggcggaggaggcgcgggagcgggccgagagggaggcagcacagtcccggcggcaggtggaggaggccgagaggctgaagcagctggccgaggagcaggcgcaggcccaggcgcaggcgcaggccgccgcggagaagcttcgcaaggaagcggagcaggaggcggtgcggcgggcgcaggcagagcaggccgccctgaagcagaagcaggtggccgacgccgagatggagaagcacaagaagtttgctgagcagactttgcggcagaaggcgcaggtggagcaggagctgaccacgctgaggctgcagctggaggagaccgaccaccagaagagcatcctggacgaggagctgcagcggctgaaggccgaggtgactgaggcagcccgccagcgcaaccaggtggaggaggagctcttctctgtgcgcgtgcagatggaggagctgagcaagctcaaggcacgcatcgaggcggagaaccgtgcgctcatcctccgcgacaaggacaacactcagcgcttcctgcaggaggaggccgagaagatgaaacaggtggcagaggaggccgcccggctgagcgtggccgcccaggaggcagcccggctgcggcagctggccgaggaggacctggcacagcagcgggccctggcggagaagatgctcaaagaaaagatgcaggcggtgcaggaggccactcgcctcaaggccgaggcggagctgctgcagcagcagaaagagctggcgcaggagcaggcccgacagctgcaggaggataaggagcagatggcccagcagctggctcaggagacgcagggtttccagcggacgctggaggcggagcggcagcgacagctggagatgagcgccgaggctgagcgcctcaagcttcgtgtggccgagatgagccgggcccaggcccgcgccgaggaggacgcccagcgcttccgcaaacaggccgaggagatcggtgagaagctgcaccgcacagagctcgccacgcaggagaaggtgacactggtacacactctcgagattcagcggcagcagagcgaccatgacgccgagcgcctacgggcggctatcaccgagctggagcgtgagaaggagaagctccaggaggaggccacgttgctgcagcagaagtctgaggagatgcaggtggtgcagcaggagcagctgctgcaggagacgcgggccctgcaggagagcttcctgtcagagaaggaccgcctgctgcagcgggagcgcttcatcgagcaggagaaggccaagctggagcagctcttccgggacgaggtggccaaggcgcagaaattgcgtgaggagcagcagcggcagcagcagcagatggagcaggagcgggagcagctggtggccagcatggaggaggcccggcagtgccagcgtgaggccgaggagggcgtgcgccgcaagcaggaggagctgcagcttctcgagcagcagcggcagcagcaggagcgactgctggccgaggagaaccagcggctgcgcgagcggctacagcgcctggaggaggagcaccgggccgccttggcgcattcggaggagatcgccgcctcgcaggccgcggctgccaaagccctgcccaacggccgggatgcgcccgacggcccagccgtggaggcagagcctgagcacatgttcgatggccttcggcggaaggtgccagcccagcggctgcaggaggtgggcatcctgagcgcagaggagctgcagcggctggcccagggccgcacgacagtggccgagcttgctcagcgggaggacgtgtgccagtacctgcagggccgcggtggcatcgccgggctgctgctcaaaccggccaacgagaagctgagtatctacgcggccctccggaggcagctgctgagcccaggcacggcgctcatcctgctggaggcacaggcggccactggcttcctcctggaccccgtgcagaaccgacggctgactgtcaacgaggctgtgaaggaaggcgtggtggggcccgagctgcaccacaagctgctgtcggccgagcgcgccgtcaccggctacaaggacccctacaccggtgagcagatctcgctcttccaggccatgcagaaggagctcatcgtgcgcgaccacggcatccgcctgctggaggcccagatcgccacgggcggcatcatcgacccggtacacagccaccggctgcccgtggacgtggcctaccagcgcggctacttcgacgaggagatgaaccgcgtgctggccgacccgagcgacgacaccaagggcttcttcgaccccaacacgcacgagaacctcacgtatctgcagctgctggagcgctgcgtgctcgaccccgagacaggcctgcgcctgctgcccctcacggaccaggccgccaggggcggtgagctggtctacaccgactccgaggcccgggacgtgttcgagaaagccactgtgtctgcaccgttcgggaagttccagggcaggacggtgaccatctgggagctcatcaactccgagtacttcacgacggagcagcggcgggatctgctgaggcagttccgcatgggcaaggtcaccgtggagaagatcatcaagatcgtcatcacggtggtggaggaacacgagcagaaaggccagctctgcttcgagggcctgcgcgccctcgtacccgccgccgagctgctcgagagcggggtcatagaccacaacctctaccgccagctgcagcggggcgagcgctctgtgcgagaggtggccgaggtggacgccgtgcggcgggccctgcggggcaccagcgtcattgcaggggtgtggctggaggagacaggacagaggctgagcatctacgaagccctgaagaaggatctcctgcctccagaggtagcagtggctctcctggaggcccaggccggcactggccacatcattgaccccgccacgagcgcccggctcaccgtggacgaggcggtgcgtgctggcctggtggggcccgagctgcatgagaagctgctgtcggccgagaaggccgtgacgggctacaaggacccgtactcggggcagagtgtttctctcttccaggccctgaagaagggcctcatccccagggagcagggcctgcgtctgcttgatgcccagttgtccacgggtggcatcgttgacccaagcaagagccaccgcgtgcccatggacgtggcctacgcccggggctacctggaccaggagaccagccgagccctgtcggcgccccaagacgaagccaagacctaccacgaccccagcacgcaggagcccgtcacctacggccagctccagcagcaatgccggcccgacccgctgacggggctgagcctgctgccgctctcggaacaggccgctcaggcccggcgggaggggctctactccgagctgcaggcccgtgagacctttcagaagacccccgtggaggtccccgtgggcagcttcaagggcaggacggtgacggtgtgggagctcctgagctccgagtacttcacgactgagcagagacaggagctgctgcggcagttccgcacgggtaccgtcaccgtggagaagatcatcaagatcgtcatcaccattgtggaggaggtggagactgtgcggcaagagaggctgtcgttcagtggcctccgtgccccggtgccagccagcgagctcctggcctctggggtcctcagcaggacccaattcgagcagctcaaggatggcaagacgtcggtgaaagacctatcagagctgagctccgtgcggacgctgctccagggcagcggctgcctggccggcatctacctggaggaatccaaggagaaggtgaccatctacgaggccatgcggcggggcctgctcaggcccagcacggccactctcctgctcgaggcgcaggcggccacgggcttcctcatcgaccccgtgcgcaaccagcgcttgtacgtccatgaggctgtgaaggcgggtgtggtggggcccgagctgcacgagaagctgctgtcggccgagaaggccgtgaccggctacaaggacccgtattcgggcagcaccatctcgctcttccaggccatgaagaagggcctggtccttcgggagcatggcatccgcctgctggaggcccagatcgccacgggtggcatcatcgacccggtgcacagccaccggctgcccgtggacgtggcctaccagcgcggctacttcgacgaggagatgaaccgcgtgctggccgacccgagcgacgacaccaagggcttcttcgaccccaacacgcatgagaacctcacgtacctgcagctgctggagcgctgtgtggaggaccccgagacgggccttcgcctgctgcccctgaaaggcgccgagaagacggaggtggtggagtccacgcaggtgtacacggaggaggagacccgcagggcattcgaggagacgcagatcgacatccctggcagcgccggccgcagcggctccactatgtccctgtgggaggtgatgcagtcggacctgatcccggaggagcagcggacccggctcatggcggacttccaggccggccgcgtgactaaggagcgcatgatcatcatcatcatcgagatcatcgagaagaccgagatcgtgcgccagcagaacctggcctcctatgactacgtccggcgtcgtctcactgccgaggacctgtacgaggcccggatcatctcccgcgagacctacagcttcctccgggaggggaccaagagcctccgacaggtgcttgaggaggaagaggcctcacgctacctctacggcacgggctgcgtggccggcgtctacctgccgggctccaggcagacactcaccatctaccaggccctcaagaaggggctgctgaacgccgaggtggcccgcttcctgctggaggcgcaggcggccacgggcttcctcctggagcccgtgaagggcgagcggctgactgtggacgaggccgtgcgcaaaggcctggtgggccccgagctgcatgaccggctgctctcagcggagcgggccgtgaccggctaccgcgacccctacaccgagcagaccatctccctcttccaggccatgaagaaggacctgatccccaccgacgaggccctgcggctgctagatgcccagctggccacgggcggcatcgtggacccacacctgggcttccacctccccttggaggtggcctaccagcgtggctacctcaacaaagacacgcacgaccagctctccgagcccagcgaggtgcgcagctacctggatccgtccacggacgagcgcctcagctacacgcagctgctccggcggtgccgccgccacgagaccagcggccagatgctcctgcctctctcggacgcccgcaagctgaccttccgcgggctgcgcaagcagatcacggtggaggagctggtgcgttcgcaggtcctggacgaggccaccgcgctgcagctgcaggagggcctgacgtcggtggaggaggtcaccaagaacctgcagaagttcctcgagggcacgagctgcattgcgggcgtcttcgtggatgccaccaaggagcggctgtcggtgtaccaggccatgaagaagggcatcatccgccctggcacggccttcgagctcctggaggcgcaggcggccactggctacgtcatcgaccccatcaaggggctgaagctgaccgtggaggaggccgtgcgcatgggcatcgtgggtcccgagttcaaggacaagctgctgtcggccgagcgcgccgtcattggctacaaggacccctactctgggaagctcatctccctgttccaggccatgaagaagggcctcatcctgaaggaccacggcatccgcctcttggaggcccagattgccacgggcggcatcatcgaccccgaggagagccaccggttgcctgtggaggtggcctacaagcgcggcctctttgatgaggagatgaacgagatcctgactgacccgagcgatgacaccaagggcttcttcgaccccaacacggaggagaacctcacgtacctgcagctgatggagcgctgcatcacggacccccagacgggcttgtgcctgctgcccctgaaggagaagaagcgggagcggaagacgtcctccaagtcatcggtgcgcaagcgccgcgtggtgatcgtggatcccgagacaggcaaggagatgtccgtgtacgaggcgtaccgcaagggcctcatcgaccaccagacgtacctggagctatccgagcaggagtgcgagtgggaagagatcaccatctcgtcctcggacggcgtggtcaagtccatgatcatcgaccgccgctcaggccgccagtacgacatcgacgaggccatcgccaggaacctcatcgaccgctcagcactggaccagtaccgcgcgggcacgctctccatcacggagttcgcggacatgctgtcaggcaacgctggcggcttccgctcccgttcctcttccgtgggctcctcctcctcctaccccatcagccccgccacctccaggacccaggcggcctcctggtcagaccccaccgaggagacgggccccgtggccggcatcctggacacggaaacgctggagaaggtgtccatcacggaggccatgcgccgcaacctggtggacaacatcaccgggcagcggctgctggaggcccaggcctgcacgggcggcatcatcgaccccagcagcggtgaacgcttccccgtcacggacgccgtcagccggggcttggtggacaagatcatggtggaccgcatcaacctggcgcagaaggccttctgcggcttcgaggacccgcgcaccaagaccaagatgtcggctgcacaggccctgaagaagggctggctgtactatgaggcgggccagcgcttcctggaggcgcagtacctgacgggcggcctcatcgagcccgacgtgccgggccgcgtgcccctcgacgaggccctgcagcggggcatggtggacgcccgcacagcccagaagctgcgggacgtcggcgcctactccaagtacctcacctgccccaagaccaagctcaagatctcgtacaaggacgcgctggaccgcagcatggtggaggagggcacggggctgcggctgctggaggccgccgcccagtccagcaagggctactacagcccctacagcgtcagcggctccggctcggccgccggctcgcgctccggctcgcgcacgggctcccgggctggctcccgccggggcagcttcgacgccaccggctccggtttctccatgaccttctcctcgtcctcctactcttcctcaggctacggccgccgctacgcctcagggcccgtgtcctccctggggggccccgagtccgcggcggcc

SEQ ID NO: 78 - protein, 4686 aa, Canis familiaris
MVAGMLMPRDQLRAVYEVLFREGVMVAKKDRRPRSLHPHVPGVTNLQVMRAMASLRARGLVRETFAWRHFYWYLTNEGIAHLRQYLHLPPEIVPASLQRVRRPVAMVMPARRIPHVQSVQGPLSCPPKWGPVPTEDPAHEERRVYRRKEPEEGASEPPVVPATTPGNLARPGPKPAPATDERDRVQKKTFTKWVNKHLIKAQRHISDLYEDLRDGHNLISLLEVLSGDSLPREKGRMRFHKLQNVQIALDYLRHRQVKLVNIRNDDIADGNPKLTLGLIWTIILHFQISDIQVSGQSEDMTAKEKLLLWSQRMVEGYQGLRCDNFTSSWRDGRLFNAIIHRHRPMLIDMSKVYRQTNLENLDQAFSVAERDLGVTRLLDPEDVDVPQPDEKSIITYVSSLYDAMPRVPDVQDGVKANELQLRWQEYRELVVLLLQWMRHHTAAFEEHRFPSSFEEIEILWCQFLKFKETELPAKEADKNRSKGIYQSLEGAVQAGQLKVPPGYHPLDVEKEWGKLHVAILDREKQLRSEFERLECLQRIVSKLQMEAGLCEEQLNHADALLQSDVRLLAASKAPQRAAEVERDLDKADGMIRLLFNDVQTLKDGRHPQGEQMYRRVYRLHERLVAIRTEYNLRLKSGVAAPVTQVTMQTTQRRPELEDATLRYLQDLLAWVEENQRRVDSAEWGGDLPSVEAQLGSHRGLHQSIDEFRAKIERARADEGQLSPAPRGTYRDCLGRLDLQYAKLLNSSKARLRSLESLHGFVAAATKELMWLSEKEEEEVGFDWGEHNSNMAAKKESYSALMRELEVKEKKIKEIQSTGDRLLREGHPARPTVESFQAALQTQWSWMLQLCCCIEAHLKENTAYFQFFSDVRETEEQLRKLQEMLRRKYICDRSITVTRLEDLLQDAQDEKEQLNEYRAHLSGLAKRAKAVVQLKPRDQAQPVRGLVPLQAVCDYKQVEVTVHKGDQYQLLGPAQPAHWKVLSSSGSEAAVPSVCFLVPPPNQEAQEAVSRLEAQHQALVALWHQLHVDMKSLLAWQCLSRDVQLIRSWSLVTFRTLKPEEQRQALRSLELHYQAFLRDSQDAGGFGPEDRLQAEREYGSCSRHYQQLLQSAEQGAQEESRCQRCISELKDIRLQLEACETRTVHRLRLPLDKEPARECAQRIAEQQKAQAEVEGLGKGVARLSAEAEKVLALPEPSPAAPTLRSELELTLGKLEQVRSLSAIYLEKLKTISLVIRSTQGAEEVLRAHEEQLKEAQAVPATLPDLEATKAALKKLRVQAEAQQPVFDALRDELRGAQEVGERLQRQHGERDVEVERWRERVAPLLERWQAALAQTDVRQRELEQLGRQLRYYRESADPLGTWLQDAKQRQERIQAVPLANSQAVREQLQQEKELLEEIERYGEKVDECQQLAKQYINAIKDYELQLVTYKAQLEPVASPAKKPKVQSGSESVIQEYVDLRTRYSELTTLTSQYIKFIRETLRRMEEEERLAEQQRAEERERLAEVEAALEKQRQLAEAHAQAKAQAEREAEELQRRMQEEVARREEAAVDAQQQKRSIQEELQHLRQSSEAEIQAKARQVEAAERSRVRIEEEIRVVRLQLEATERQRGGAEGELQALRARAEEAEAQKRQAQEEAERLRRQVQDESQRKRQAEAELALRVKAEAEAAREKQRALQALEDVRLQAEEAERRLRQAEADRARQVQVALETAQRSAEVELQSKRASFAEKTAQLERTLQEEHVAVAQLREEAERRAQQQAEAERAREEAEQELERWRLKANEALRLRLQAEEVAQQKSLAQAEAEKQKEEAEREARRRGKAEEQAVRQRELAEQELEKQRQLAEGTAQQRLVAEQELIRLRAETEQGEQQRQLLEEELARLQREAAAATHKRQELEAELAKVRAEMEVLLASKARAEEESRSTSEKSKQRLEAEASRFRELAEEAARLRALAEETKRQRQLAEEDAARQRAEAERVLAEKLAAISEATRLKTEAEIALKEKEAENERLRRLAEDEAFQRRRLEEQAAQHKADIEERLAQLRKASENELERQKGLVEDTLRQRRQVEEEILALKASFEKAAAGKAELELELGRIRSNAEDTLRSKEQAELEATRQRQLAAEEEQRRREAEERVQKSLAAEEEAARQRKSALEEVERLKAKVEEARRLRERAEQESARQLQLAQEAAQKRLQAEEKAHAFAVQQKEQELQQTLQQEQSMLERLRAEAEAARRAAEEAEEARERAEREAAQSRRQVEEAERLKQLAEEQAQAQAQAQAAAEKLRKEAEQEAVRRAQAEQAALKQKQVADAEMEKHKKFAEQTLRQKAQVEQELTTLRLQLEETDHQKSILDEELQRLKAEVTEAARQRNQVEEELFSVRVQMEELSKLKARIEAENRALILRDKDNTQRFLQEEAEKMKQVAEEAARLSVAAQEAARLRQLAEEDLAQQRALAEKMLKEKMQAVQEATRLKAEAELLQQQKELAQEQARQLQEDKEQMAQQLAQETQGFQRTLEAERQRQLEMSAEAERLKLRVAEMSRAQARAEEDAQRFRKQAEEIGEKLHRTELATQEKVTLVHTLEIQRQQSDHDAERLRAAITELEREKEKLQEEATLLQQKSEEMQVVQQEQLLQETRALQESFLSEKDRLLQRERFIEQEKAKLEQLFRDEVAKAQKLREEQQRQQQQMEQEREQLVASMEEARQCQREAEEGVRRKQEELQLLEQQRQQQERLLAEENQRLRERLQRLEEEHRAALAHSEEIAASQAAAAKALPNGRDAPDGPAVEAEPEHMFDGLRRKVPAQRLQEVGILSAEELQRLAQGRTTVAELAQREDVCQYLQGRGGIAGLLLKPANEKLSIYAALRRQLLSPGTALILLEAQAATGFLLDPVQNRRLTVNEAVKEGVVGPELHHKLLSAERAVTGYKDPYTGEQISLFQAMQKELIVRDHGIRLLEAQIATGGIIDPVHSHRLPVDVAYQRGYFDEEMNRVLADPSDDTKGFFDPNTHENLTYLQLLERCVLDPETGLRLLPLTDQAARGGELVYTDSEARDVFEKATVSAPFGKFQGRTVTIWELINSEYFTTEQRRDLLRQFRMGKVTVEKIIKIVITVVEEHEQKGQLCFEGLRALVPAAELLESGVIDHNLYRQLQRGERSVREVAEVDAVRRALRGTSVIAGVWLEETGQRLSIYEALKKDLLPPEVAVALLEAQAGTGHIIDPATSARLTVDEAVRAGLVGPELHEKLLSAEKAVTGYKDPYSGQSVSLFQALKKGLIPREQGLRLLDAQLSTGGIVDPSKSHRVPMDVAYARGYLDQETSRALSAPQDEAKTYHDPSTQEPVTYGQLQQQCRPDPLTGLSLLPLSEQAAQARREGLYSELQARETFQKTPVEVPVGSFKGRTVTVWELLSSEYFTTEQRQELLRQFRTGTVTVEKIIKIVITIVEEVETVRQERLSFSGLRAPVPASELLASGVLSRTQFEQLKDGKTSVKDLSELSSVRTLLQGSGCLAGIYLEESKEKVTIYEAMRRGLLRPSTATLLLEAQAATGFLIDPVRNQRLYVHEAVKAGVVGPELHEKLLSAEKAVTGYKDPYSGSTISLFQAMKKGLVLREHGIRLLEAQIATGGIIDPVHSHRLPVDVAYQRGYFDEEMNRVLADPSDDTKGFFDPNTHENLTYLQLLERCVEDPETGLRLLPLKGAEKTEVVESTQVYTEEETRRAFEETQIDIPGSAGRSGSTMSLWEVMQSDLIPEEQRTRLMADFQAGRVTKERMIIIIIEIIEKTEIVRQQNLASYDYVRRRLTAEDLYEARIISRETYSFLREGTKSLRQVLEEEEASRYLYGTGCVAGVYLPGSRQTLTIYQALKKGLLNAEVARFLLEAQAATGFLLEPVKGERLTVDEAVRKGLVGPELHDRLLSAERAVTGYRDPYTEQTISLFQAMKKDLIPTDEALRLLDAQLATGGIVDPHLGFHLPLEVAYQRGYLNKDTHDQLSEPSEVRSYLDPSTDERLSYTQLLRRCRRHETSGQMLLPLSDARKLTFRGLRKQITVEELVRSQVLDEATALQLQEGLTSVEEVTKNLQKFLEGTSCIAGVFVDATKERLSVYQAMKKGIIRPGTAFELLEAQAATGYVIDPIKGLKLTVEEAVRMGIVGPEFKDKLLSAERAVIGYKDPYSGKLISLFQAMKKGLILKDHGIRLLEAQIATGGIIDPEESHRLPVEVAYKRGLFDEEMNEILTDPSDDTKGFFDPNTEENLTYLQLMERCITDPQTGLCLLPLKEKKRERKTSSKSSVRKRRVVIVDPETGKEMSVYEAYRKGLIDHQTYLELSEQECEWEEITISSSDGVVKSMIIDRRSGRQYDIDEAIARNLIDRSALDQYRAGTLSITEFADMLSGNAGGFRSRSSSVGSSSSYPISPATSRTQAASWSDPTEETGPVAGILDTETLEKVSITEAMRRNLVDNITGQRLLEAQACTGGIIDPSSGERFPVTDAVSRGLVDKIMVDRINLAQKAFCGFEDPRTKTKMSAAQALKKGWLYYEAGQRFLEAQYLTGGLIEPDVPGRVPLDEALQRGMVDARTAQKLRDVGAYSKYLTCPKTKLKISYKDALDRSMVEEGTGLRLLEAAAQSSKGYYSPYSVSGSGSAAGSRSGSRTGSRAGSRRGSFDATGSGFSMTFSSSSYSSSGYGRRYASGPVSSLGGPESAAA

SEQ ID NO: 79 - DNA, 2283 bp, Trypanosoma cruzi
  CDS (1)..(2283)
atgttagagcagcgcatcatatccgtggagcggcgctctgctgcgatggagcgcgccatcattgctgcaatggaggaggtggatgaattgcgctcattattcttgacacgtatagatggcattcaacgtgtcgacgccttggaaaacacggcaaaggaaggtcgggacgccacccccgcgaagagcaaaaaaggtgacctggcgagtgtcccaaagaagccgcgtgtcggcgcagtgggcgagagaaaagaaaaagggaaaagtggcaggggaggggagtggtacaacaccccctgcagtgagctgacgctgcgccacctggaagaggtgatgcaattagcaaccgaggcaattgcggcatcggcagcgcagaaggagaagtcacatctgcatgaggtgcggcagagtgccctcgagaaggaggtggaggcgctgcactctcagctggagaggcgcactcaaggtgtggagcaacacacctcgcagcaggtgcaggagatggaaatgaaactacgcaaattggagaccaaaatgcagcggcaacgcgaagaattgatagatgaagtcctgaagcgccttcatggatttcgtgaagcatcgccactggaagggggcggcggcgaggagcttattcagaggctacaggagcgtgtttctcagcttgagctgaagcaggaggcgctacggagcctcgttgccacagaacttgatgcagtgatggaggaccgcgttaagagtattgctgaatcgcacctccagcaactcctacgtgaacagcagcaacagcagcagtggttgaagggtggcagcactgtgaacacgagcacacaagaaacgacagctaaaaacggtgttgcctctgctgctgccattgacccatcgcctgccgctgccggaccgctggattttcgcagccttcgcctcgacgtcgatgtgcttcgtcaggaccttgtccgctgtatcgtggagattgaaaaagtcatggatcagcagcaacgcctgggggttcgtgtgcacagctgcgtgagcaccgtgcaacgacaccaaaccgacattgacgggctctcggatcagcagaaaacgctgattcagtctcacatggcgcgccttgagactcagcaggccacagcaactgcgcggcaggaaaaacatttggccgcggagctggatgtgctgcacgcgaaggttctgtcggaagtgcgacgcgtccatgagcagcagaccgacatgattgtgcgatccgagcatcagcgactggatgatttggcggcggcgcaggagaggctgcgggatgaattgcgcgttgccgttgaaaagcagcgcgaggaggtgaggatggccatcgagcaggtttcagagaccgggcggcggttggagcgtgaattggcgtcccaactgcgaggtgagacagcgcggcaaattgacgcggcacggcaggctcaggaagtttccacagatgaaacacaacggcttctgcaggacacacaggaggaactccgacgaatgcagaacaatctgaaggacagcgccgtgctgatgcaagagcgaagccgacggtttgaggagtcgatggaaaatcggctcaataacgaggctcgccggattaagacgtttacgaatgacgcaacgttgcgactacagaagcaagtagaggatgaggtgcggcgccttgtgcatatcaccgagcaagagtctttgtcatctatgcagcatgaaatgcagcgtgtcaatgtcgctctgcaggccctggaagaggagcagcgggcgctccgtgaagggttgctcacgctatcggcaccctccagaacgatggcaagcctagatcaccgcatgaatgtgttgcaggaggatgttaggagtgtgtttgcccaaattgagcatgtgcaggatattggagcgcctgggctaacgaagcacgtgcttgccaagcagcagcgaatgctgcaggatgatatattagaagtgaaatcgagattgcgtcgctgcgaggagtgctgtggctacacaaatgttgtgccacagacgcaggagatggaactgtcacagaccttgagtggcaaggcgtttccccacattaccgtgacgcagccgaccaaattgacgacggaatcattaacgccggggaaaccaactttggggcaggcgagtgatgtcgctgcaggggtcgttcaaagcccaggtgtgccttacgggcttaatcaaggcaaactgatcaagggtacatcagagataaaccccttcagcagcacgttttatgatcctcttgctggtgtctttgactga

SEQ ID NO: 80 - protein, 760 aa, Trypanosoma cruzi
MLEQRIISVERRSAAMERAIIAAMEEVDELRSLFLTRIDGIQRVDALENTAKEGRDATPAKSKKGDLASVPKKPRVGAVGERKEKGKSGRGGEWYNTPCSELTLRHLEEVMQLATEAIAASAAQKEKSHLHEVRQSALEKEVEALHSQLERRTQGVEQHTSQQVQEMEMKLRKLETKMQRQREELIDEVLKRLHGFREASPLEGGGGEELIQRLQERVSQLELKQEALRSLVATELDAVMEDRVKSIAESHLQQLLREQQQQQQWLKGGSTVNTSTQETTAKNGVASAAAIDPSPAAAGPLDFRSLRLDVDVLRQDLVRCIVEIEKVMDQQQRLGVRVHSCVSTVQRHQTDIDGLSDQQKTLIQSHMARLETQQATATARQEKHLAAELDVLHAKVLSEVRRVHEQQTDMIVRSEHQRLDDLAAAQERLRDELRVAVEKQREEVRMAIEQVSETGRRLERELASQLRGETARQIDAARQAQEVSTDETQRLLQDTQEELRRMQNNLKDSAVLMQERSRRFEESMENRLNNEARRIKTFTNDATLRLQKQVEDEVRRLVHITEQESLSSMQHEMQRVNVALQALEEEQRALREGLLTLSAPSRTMASLDHRMNVLQEDVRSVFAQIEHVQDIGAPGLTKHVLAKQQRMLQDDILEVKSRLRRCEECCGYTNVVPQTQEMELSQTLSGKAFPHITVTQPTKLTTESLTPGKPTLGQASDVAAGVVQSPGVPYGLNQGKLIKGTSEINPFSSTFYDPLAGVFD

SEQ ID NO: 81 - DNA, 15231 bp, Rattus norvegicus
  CDS (1)..(14061)
atggtggctggcatgctcatgccactggaccagcttcgggccatctatgaggtgctctttcgtgagggggtgatggttgccaagaaggaccggcgaccccgaagcctgcatccccatgtgcccggcgtcaccaatctacaggtcatgcgtgccatgacctcgctgaaagctcggggcctggtgcgggagacctttgcctggtgccacttctactggtacctgaccaacgagggcatcgaccacctacgccagtacctacacctgccaccggagatcgtacctgcctctctgcagcgtgtgcgccgccctgttgccatggtgatgcctgcacgtcgtcgctccccccatgtgcagaccatgcaaggtcccttaggctgtccaccaaagaggggccctctgccagctgaggaccctgcccgggaggagcggcaggtctatcgcaggaaggagcgtgaggaaggggcacctgaaacccctgtggtgtctgccaccatcgtggggaccctggccaggcccggcccagagcccaccccagccacagatgaacgagaccgtgtgcagaagaaaacttccaccaagtgggtcaataaacaccttatcaaggctcaaaggcacatcagtgacctgtatgaagacctccgtgatggccacaacctcatctccctgctggaagtcctctcaggagacagcctgccccgagagaaggggaggatgcgtttccacaagctgcaaaacgttcagattgccctggactatctccgacatcggcaggtgaagttggtgaacatcagaaatgatgacatcgccgatggcaaccccaagctgaccctgggcctgatctggacaatcatcctgcacttcaagatctcagacattcaggtgagcggccagtccgaggacatgacagccaaggagaagctgctgctgtggtctcagcgtatggtagagggctaccaaggcctgcgctgtgacaacttcaccaccagctggcgcgacggccggctcttcaatgctatcatccacaggcacaagcccatgctcatagacatgaataaagtgtaccgacagaccaacctggagaacctagaccaggccttctccgtggcagagcgggacctgggagttaccaggctcctggacccagaagatgtggatgtccctcagcctgatgagaagtccatcatcacctacgtttcatccctgtatgatgccatgccccgtgtgccgggcgcacaggatggagtgagggccaatgagctgcagcttcgttggcaagagtaccgggagcttgtgctgctgctgctacagtggatccggcaccacaccgctgcttttgaggagcgcaagttcccctccagctttgaggagattgagatcctatggtgccagtttctgaagttcaaggagacagaacttcctgccaaggaggcagacaagaaccggtccaaaggcatctaccagtctttggagggagcagtacaagcaggccagctcaagattccccctggctaccacccgctagacgtggaaaaggagtggggcaagctgcacgtggccatcctggagcgggagaagcaactccggagcgagtttgagaggctggagtgtcttcagcgcattgtgagcaagctacagatggaggctgggctatgtgaggagcagctgtaccaggcggattccctactgcagtcggatattcggctgctggcctcaggcaaggcggcacagcgggctggggaagtggagagagacctggacaaggctgatggtatgatccggctgttgttcaatgatgtgcagacccttaaagatgggcggcatccacagggtgaacagatgtaccggagggtgtatcgtctgcatgagcgcctggtagccatccgcactgaatacaacctccggctgaaggcaggggtgggtgcccctgtgacccaggtgaccctgcagagcacacagaggcgcccagagctagaggactccacactgcgttacctgcacgacctgctggcatgggtggaggagaaccagcgtcgaatagacggtgctgagtggggcgtggacttgcccagtgtagaggcacagctgggcagccaccgaggcatgcatcagtctattgaggaattccgggccaagatcgagcgggctcggaatgatgagagccagctctcccctgccacccgaggtgcctaccgagactgcctgggccgcctggacctgcagtatgcaaagctgctgaactcctccaaggcccgcctccggtccctggagagcttgcatgggtttgtggcggcagctaccaaggagctgatgtggctgaatgagaaggaagaggaagaagtgggctttgattggagtgaccgcaacaccaacatggctgccaagaaagaaagttactcggccctgatgcgtgagctggagatgaaggaaaagaaaattaaggagatccagaacacgggggacaggttgctgcgggaagaccatcctgcccggcccacagtggagtccttccaggctgccctgcagacacagtggagctggatgctgcagctgtgttgctgcattgaagcgcacttgaaagagaacacagcctacttccagttcttctcagatgttcgggaggctgaggaacagttgcagaaactacaggagacgttacgcaggaagtacagctgtgaccgctccatcactgtcacaaggcttgaggacctgctgcaggatgcccaggatgagaaggagcaactgaatgagtacaaagggcacctctcaggcctggccaagcgggccaaggctattgtgcagctgaagccacgcaaccctgcccaccctgtgcggggtcacgtgcccctgctagctgtgtgtgactacaagcaggtggaggtgactgtgcacaagggtgaccaatgccagctggtgggccctgcacagccgttccactggaaggtgctcagtagttccggcagtgaggctgccgtgccttctgtgtgctttcttgtgccgccacccaaccaggaggcccaggaagctgttgctaggctggaggcccagcatcaggccctggttactctgtggcaccagcttcacgtggacatgaagagtcttctggcatggcagagcctcaatcgtgacatacagctcatccggtcctggtccctagtcacgttccgcacgctgaagcccgaggagcagcggcaagctctgcgcaacctggagttgcactaccaggccttccttcgagacagccaggacgctggtggctttgggcccgaggaccggctggtggcagagcgcgaatatggatcttgtagtcgccactaccagcagctgctacaaagcctggagcagggtgagcaggaagagtctcgctgtcagcgatgcatctcggagctcaaggacattcggctgcaactggaggcctgtgagactcggactgtgcaccgtctgcggctgccactggataaagaccccgcacgggagtgtgcccagcgcatcgctgagcaacagaaagcacaggctgaggtggaggggctgggcaagggagttgcccggctgtctgctgaggctgagaaagttctggccttgccagagccgtcacctgctgcaccaactctgcgctcggagttggaattgaccctgggcaagctggaacaggtcagaagcctgtctgccatctacttggagaaactcaagaccatcagcttggtaattcgcagtacccagggggctgaggaggtgcttaaaacacacgaggagcacctgaaggaggcccaggccgtgcctgccacactccaagagctcgaagtcaccaaggcttcactaaagaagctgcgggcccaggcggaggcacagcagcctgtattcaacaccctacgagatgagctgaggggggcacaggaagttggtgaacggctacagcagcggcatggtgagcgggacgtggaagtagagcgctggcgagaacgtgtcactcagttgctggagcgctggcaggctgtgctagcccagactgatgtgcggcagcgggagcttgaacagctgggccgccaacttcgctactaccgtgaaagtgcggatccgctgagctcctggctgcaggatgccaagagccggcaagaacagatccaggctgtgccaatagccaacagtcaggctgcacgagaacagctgcgccaggagaaggccctgctggaggagattgagcgccatggtgagaaggttgaggagtgccagaagtttgctaagcagtacatcaatgcaatcaaggactatgagctccagctgatcacctacaaggctcagcttgaacctgtggcctcccccgccaagaagcccaaggttcagtctggatcggagagcgtcatccaggagtacgtggatctgcgtacacgctacagtgagctgaccacactcacgagtcagtacatcaagttcatcagtgagacactgcgccgcatggaagaggaagagcggctggctgagcaacagcgggcagaggagcgggagcgcctggccgaggtggaggccgcgctggagaagcagcggcagctggctgaggcccatgcccaggccaaggcacaggccgagctggaggcacgagaactgcagcggcgcatgcaggaggaggtgacgcggcgcgaggaggcggcggtggacgcacagcaacagaagcgcagcatccaagaggagctgcagcatctgcggcaaagctcagaggcagagatccaggccaaggcccagcaggtggaggctgcagagcgcagccgcatgcgcattgaggaagagatccgcgtagtccgtctgcagctagagacaactgagcgtcagcgtggaggggcggaggatgagctgcaggctctgcgtgcacgggctgaggaggcagaagcacagaagcggcaggctcaggaggaagccgagcgcttgcggaggcaggtgcaggatgagagccaacgcaaacggcaggcggaggccgagctggccctgcgtgtgaaggcagaagcggaggcagcgcgagagaagcagcgggccctgcaggctctggatgaactgaaactgcaggccgaggaggccgaacggtggctgtgccaagccgaggcagagagggctcgccaagtgcaggtagccctggagacagcgcagcgtagtgcagaagtggagctgcagagcaagcgtccgtcctttgcagagaagaccgcacagttggagcgcacgctgcaggaagagcacgtgacagtgacacagctgcgggaggaggcggaacggcgggcacagcagcaggctgaagccgagcgagcccgtgaggaagccgagcgggagctggagcgctggcagctgaaggccaatgaggcgctgcggctgcggctgcaggcagaggaggtggcacagcagaagagcctggcccaggccgatgcggagaagcagaaggaagaggcagaacgggaagcccggcggcggggcaaggcagaggagcaggccgtgcggcagcgagagctggctgagcaggagctggagaagcagcggcagctgacagagggcaccgcccagcagcgcctggctgccgagcaggagctgattcgcctgcgggcagagacggagcaaggtgagcatcagcggcagctgctggaggaagagctggcccggctacagcacgaagcgacagcagccacacagaagcgccaggagctggaggctgagctggcgaaggttcgggcagagatggaggtactgctggccagcaaggcacgagccgaagaggagtctcgctccaccagtgaaaagtccaagcagaggctggaagctgaggcagggcggtttcgagagctggctgaggaggctgcccgcctgcgtgctctggccgaggaggcaaggcggcaccgggagttggccgaggaggacgcggcacgccagcgggccgaggcggacggagtgcttacggagaagctggctgccatcagtgaggccacaaggctcaagacggaggcagagattgcactcaaagagaaggaggccgagaacgagcgcctgaggcgcctggctgaagatgaggccttccagcggcgccggctggaggagcaggcagcacagcacaaggcagacatagaggagcgcctggcccagctgcgcaaggcatccgagagcgagctggagcgacagaaggggttggtggaggataccctgcggcagcggcggcaggtggaggaggagatcatggctctgaaggcgagcttcgagaaggccgcggctggcaaggcagaactggagctggagcttggccgcatccgcagcaatgccgaggacaccatgcgcagcaaggagctggccgagcaggaggcagcgcggcagcggcagttggcagctgaggaggagcagaggcgccgggaagccgaggagcgggtgcagaggagcctggcagcggaggaggaagccgcacggcagcgcaaggtcgcactggaggaagtcgagcggctcaaggccaaggttgaggaagcgcggcgcctgcgagagcgagctgagcaggagtctgcgaggcagctgcagctggcccaggaggctgcccagaaacggctgcaggcggaggagaaggcgcacgcctttgtggtgcagcagcgagaagaggagctgcagcagactcttcagcaagagcagaacatgctggagcggctgcggagcgaggcagaggcagcgcggcgagctgctgaggaggcggaggaggcccgggagcaggcagaacgtgaggcagcgcagtctaggaagcaagtggaagaggccgagcggctgaagcagtcggcagaggagcaggctcaggcccaggcccaggcgcaggcggctgcagagaaactgcgcaaggaagcggagcaggaggcggcgcgtcgggcccaggcggagcaggctgcgttgaaacagaagcaggcagccgacgcggagatggagaagcacaagaagtttgcagagcagacgctacggcagaaggctcaggtagagcaggagctgaccacgctgaggctgcagctcgaggagaccgaccaccagaagagcatcctggatgaggagctgcagcggctaaaggctgaggtaacagaggcagcccggcagcgtagccaggtagaggaggagctcttctctgtccgcgtgcagatggaggagctgggcaaactcaaggctcgcattgaagctgaaaaccgggcactcatccttcgtgacaaggacaacacacagcgcttcctggaggaggaggccgagaagatgaaacaggtggcagaggaagctgcacggttgagcgtagctgcccaggaggcagcaaggctgcggcagctagccgaggaggacctggcccagcagcgggccctggcggagaagatgctgaaggagaagatgcaggcggtgcaggaagccacaaggctcaaggctgaggctgagctgctgcagcagcagaaggagctggcacaggagcaggcccggcggctgcaggcggacaaggagcaaatggctcagcagttggtagaggagacacagggtttccagcggaccctggaggctgagcggcagcggcagctagaaatgagcgcagaggctgaacgcctcaagttgcgcatggctgagatgagccgggctcaggcccgtgcagaggaggatgcccagcgcttccggaagcaggctgaagagatcggcgaaaagctgcaccgcactgaactcgctacacaggagaaggtgacattggtgcagactctcgagatccagcgacagcagagtgaccaagatgccgagcgtctgagggaggccattgctgagctggagcgtgagaaggagaagctcaagcaggaggcgaagttactgcagctcaagtctgaggagatgcagactgtgcagcaggagcagatactgcaggagacacaggccctgcagaagagctttctctctgagaaggacagcttgctgcaacgcgaacgcttcatcgagcaggagaaggccaagctggagcagcttttccaggacgaggtggcaaaagcaaaacagctgcaggaggagcagcagcggcagcagcagcagatggagcaggaaaagcaggagctggtggccagcatggaggaggcccggaggcggcagcgtgaggcagaggagggtgtgaggcgcaagcaagaggaactgcagcgtctggagcagcagcggcagcagcaggagaaactactggcagaggagaaccagaggctgcgggagcggctgcagcgcctggaggaagagcaccgagctgcgttggcgcactctgaggagatcgccacctcccaggctgctgccacaaaagcactgcccaatggccgcgacgcacttgatggcccctccatggaggccgagcccgagtacacctttgagggattacgtcagaaggtgccagctcagcagctacaggaagcaggcattctgagcatggaggaactgcagcgtttgacacagggtcacaccacggtggctgagctcacgcagcgggaagatgtgcgccactacctgaagggcggcagcagcatcgcaggattgctcctgaagcccaccaatgagaaactgagtgtctacacagccctacagcggcagctgctcagccctggaacagcccttatcttacttgaggcccaggcagcctcgggcttcctgctggaccctgtccggaaccggcggctgacggtcaatgaggctgtgaaggagggtgtggtgggtcccgagctgcaccacaagctgctgtcagctgagcgtgccgtcactggctacaaggacccttacacaggagaacagatctctctcttccaggccatgaagaaggacctcattgtcagggaccatggcatccgcctgctggaagcccagatcgccacaggtggcatcattgaccctgtacacagccaccgtgttcccgtggacgtggcctaccagcgtggctacttcgatgaggagatgaaccgtgtgctggctgacccaagcgatgacaccaagggcttctttgaccccaacactcacgagaacctcacgtacctgcagctgctggagcgctgtgtggaggaccccgagacaggcctgcgcctcctgccactcacagacaaggctgccaagggtggtgagctggtgtacactgacacggaggcccgtgacgtcttcgaaaaggccacagtgtctgcaccattcggcaagttccagggcaagaccgtgaccatctgggagatcatcaactcagagtacttcacagcggagcagcgacgggacctgctccggcagttccgcacgggccgcatcacggtggagaagatcatcaagattgtcatcacggtggtagaggaacacgagcggaagggccagctctgctttgagggcctccgtgcccttgtgcctgctgcagagctgctggacagtggagtcatcagtcatgaagtctaccagcagctgcagcggggtgagcgctctgtgcgggaagtggccgaggcagacgaggtgaggcaggccctgcggggtaccagtgtcattgccggtgtgtggctggaagaagcagggcagaagctgagcatctatgaggccctgaggagagatttgctgcagccagaggtggctgtggccttgctggaggcccaggctggcactgggcacatcattgaccctgccacgagtgccaggctgactgtggatgaggcagtgcgtgctggcctggtgggtcctgagatgcacgagaagctcttgtcagctgagaaggctgtaacaggctatagggatccctactcgggacagagcgtctcgctcttccaggctctgaagaagggtctcatcccccgagaacagggcctgcgcctgctggatgcccagttatccactggtggcattgtagaccccagcaaaagccaccgtgtgcccctggatgttgcctatgcccggggctacctggacaaagagactaacagggccctgacgtcacccagagacgatgccagagtctaccttgaccccagcacccgggagccagtcacctacagccagctccaacagcggtgccggtctgaccagctgactgggttgagcctactgcccctctcagagaaggccgtccgggcccggcaggaagaggtctactctgagctccaggcccgtgagacattggagaaggccaaggtggaggttcctgtgggcggctttaagggcagggcgctgacagtgtgggagctcataagctcggaatacttcactgaggagcagcggcaggagctgctacggcagttccgcacaggcaaggtcactgtagagaaggtcatcaagattcttatcaccattgtggaggaggtggagactcaacggcaggagagactgtccttcagtggcctccgtgcccctgtgccggccagtgagctcctggcctccaagatcctcagcagaactcagtttgagcagctcaaggatggcaagacatcagtcaaagatctgtcagaggtgggctctgtgcggacactgctgcaaggcagcggctgcctggctggcatctatctggaggactcgaaggagaaagtaaccatctatgaggccatgcgccggggcctcctcagagccagcacagccacactcctgctggaggcccaggcggccactggttttctagtggaccctgtgcggaaccaacgtctgtacgtccatgaagctgtcaaggctggagtggtgggcccggagctccatgagaagctgctgtcggctgagaaggcggtcactggttacaaagatccctactctggcagcaccatctcgctgttccaggccatgaagaagggcttggtcctcagggaccatgccatccgcctgctggaggcccagattgccacaggtggcatcattgaccctgtgcacagtcaccgccttcccgtagatgttgcctaccagcgtggctacttcgatgaggagatgaaccgtgtgctggctgacccaagtgatgacaccaagggcttcttcgaccccaacacccacgagaacctcacgtacctgcagctgctggagcgctgcgtggaggaccccgagacaggcctgcgcctcctgccactcagaggggcagagaagacagaggtggtagaaaccacacaggtgtatactgaggaggagactcggagggcgttcgaggagacgcagattgacatcccaggtggtggcagccacggtggctcctccatgtctctatgggaggtgatgcagtcagacatgatcccagaggaccagcgtgcccggctcatggccgactttcaggctggcagagtgaccaaggagcgcatgatcattatcatcatcgaaatcattgagaagacggagatcatccgccagcagaacctcgcctcctatgactacgtacgccgccgcctcaccgccgaagacctgtatgaggcccggatcatctcccttgagacctacaacctcttccgggaaggcaccaagagcctccgtgaggttctggagatggaatctgcctggcgctacctttacggcacaggatcggtggccggtgtctacctgcctggctctaggcagacgctaaccatctaccaggcccttaagaaggggctgctgagtgccgaggtggcccgcttgctgctggaagcacaggcagccacaggctttctgctggacccagtgaaaggcgagaggctgactgtggacgaggccgtgcggaagggtctggtaggccccgagctgcacgatcggctcctctctgccgagcgagctgtaactggctaccgagacccctacaccgaacagcccatctcactcttccaggccatgaagaaggagctgatccctgccgaggaggcactgaggctgctggatgctcagctagccacaggaggcattgtggacccccgcctgggtttccacctccccctggaggtggcttaccaacgaggctacctcaataaggacacgcatgaccagttgtcagagcccagtgaggtgcgcagctatgtggacccctccacggatgagcgtctcagctacacacagctgctcaagcgttgccgccgtgacgacaacagcggccagatgctgctgccgctctctgatgcccgcaagctgaccttccgcggcctgcgcaagcagatcaccgtggaggagctggtacgctctcaggtcatggatgaggccacagcactgcagctgcaagaaggcctgacctccattgaggaggtcactaagaacctgcagaagttccttgagggtaccagctgcattgctggagtctttgttgatgctaccaaggaacggctgtcggtgtaccaggccatgaagaagggcatcatccgtcccgggacagccttcgagctcctggaagcgcaggcagccaccggctacgtcattgaccctatcaaggggctcaagctgactgtggaagaggccgtgcgcatgggtatcgtgggccccgagttcaaggacaagctgctgtctgctgagcgtgccgtcactggctacaaggacccttactctgggaaactcatctctctcttccaggccatgaagaagggcctgatcctgaaggaccatggcatccgcctgctagaggctcagatcgccaccggtggcatcattgaccctgaggagagccaccgcctgcctgtggaagtggcctataagcgtggtctctttgatgaggagatgaacgagatcctgactgacccctcagatgacaccaagggcttcttcgacccaaacaccgaggagaacctcacatacctgcagctgatggagcgctgtatcactgacccccagactggcctgtgtctcctgccgctgaaggaaaagaagcgggagcggaagacgtcctccaagtcctcagtgcgcaagcgccgcgtggtgattgtggaccctgagacgggcaaggagatgtcagtgtatgaggcctaccgcaagggcctcatagaccaccagacatacctggagttgtcagagcaggagtgcgagtgggaagaaatcaccatctcttcctcggacggcgtcgtcaaatctatgatcatcgaccgccgctctggccgccagtatgacattggtgacgccatcaccaagaacctcattgaccgctcagcactggaccagtaccgcgctggcacactttctatcaccgagtttgccgacatgctctcaggcaacgctggtggcttccgctcccgctcctcctctgtgggctcatcttcctcctaccccatcagttctgctgtccctaggacccagctagcctcctggtctgatcctactgaggagactggcccagtggccggcatcctagacacagagactctggagaaggtgtccatcacagaggccatgcaccgcaacctggtagacaacatcactggccagcggttgctggaggcacaggcctgcaccgggggcatcattgaccccagcactggtgagcgcttcccggtcactgaggctgtcaacaagggcctggtggacaagatcatggtagaccgtatcaatctggcccagaaggccttctgtgggtttgaggacccacgcaccaagaccaagatgtcagctgcccaggccctgaagaagggctggctttactacgaggcaggccagcgtttcctcgaggtgcagtacctgacgggtggtctgattgagcctgacacacctggccgtgtgtctcttgatgaagccttgcaacgtggcactgtggatgcccgcacagcccagaagctgcgtgatgtcagtgcctactccaagtacctcacgtgccccaagaccaagctcaagatctcttacaaggacgctctggatcggagcatggtggaggagggcacagggctgaggctgctggaagccgcggcacagtccagcaagggctactacagcccgtacagtgtcagtggctctggctctactgctggttcacgcactggttcacgcaccggctccagggccggctcccgtcgtggcagctttgatgccactggctctggcttctccatgaccttttcttcttcctcctactcttcctcaggctatggccgccgctatgcctcagggccttcagcctctcttgggggccctgagtctgcagtggcctgatcccccagcctgtatcctgccttcccgctctgcatgtcgccaggctccccgtggaggcgctggggtcttttctttcttcttctttttttttttttttttaacatttaaaggtgtcttcctcccaagcggtgcctaaaatctaaccaaaaagaccagaataacacattaatatatatatatatatgcgatgtccagacagcctgtgtcttgggaaacagggctggcccaggcccagtgaccactccactctccttgggcctccctaatcctttctacctgccactcaccacagctaggtgccttggagaatccagagctgggcactcagcccactactcctgtctctcctgggaggattgccatctgggaaaggcccccagacctctaagccaaccccactggatgtctacctgctggtcctagctgctgaggggaactggggacggtcctgtgagcagacagctgttgagtctcttgaggcctctgccctgagccagctgcttctccccagtgtatacctgaatattcagtgggttttgctggcaaaggaaagatcccaggccaaccatctcttccagcctgcccagagaagccccttccccatgggaagataaggcctggtcctggccccagcctcccgcctggctcctgcagctgccattggagctgtgctttgtagctcactaccccatacttattcccttgagacctgagcctctgcttcagccttccagcctcaactccccttgtaagtgccttctgtgtccttgtacccaggccctaaagacccagacccagggcaagagatggacattctggctgggcggggctggagggttctgcagatctgagaattccttctccagaggcccagggtcttcaagcctgtggaacccctctgggtgctgctgcccaccccactcccagggagccctggccagcccagctgtgctaacataagtacttggccagtgacactctcccttccctggccttggtggctcctacccctgcctccaccctctgagtgagctttgcatgttccactaaccttgagctggtgacaggtggagatgccaggcagaacactaacctgaccatgggcgggggccctgcggtgtccgcccctcaataaaagcaattccaaccttaaaaaaaaaaaaaaaa

SEQ ID NO: 82 - protein, 4687 aa, Rattus norvegicus
MVAGMLMPLDQLRAIYEVLFREGVMVAKKDRRPRSLHPHVPGVTNLQVMRAMTSLKARGLVRETFAWCHFYWYLTNEGIDHLRQYLHLPPEIVPASLQRVRRPVAMVMPARRRSPHVQTMQGPLGCPPKRGPLPAEDPAREERQVYRRKEREEGAPETPVVSATIVGTLARPGPEPTPATDERDRVQKKTSTKWVNKHLIKAQRHISDLYEDLRDGHNLISLLEVLSGDSLPREKGRMRFHKLQNVQIALDYLRHRQVKLVNIRNDDIADGNPKLTLGLIWTIILHFKISDIQVSGQSEDMTAKEKLLLWSQRMVEGYQGLRCDNFTTSWRDGRLFNAIIHRHKPMLIDMNKVYRQTNLENLDQAFSVAERDLGVTRLLDPEDVDVPQPDEKSIITYVSSLYDAMPRVPGAQDGVRANELQLRWQEYRELVLLLLQWIRHHTAAFEERKFPSSFEEIEILWCQFLKFKETELPAKEADKNRSKGIYQSLEGAVQAGQLKIPPGYHPLDVEKEWGKLHVAILEREKQLRSEFERLECLQRIVSKLQMEAGLCEEQLYQADSLLQSDIRLLASGKAAQRAGEVERDLDKADGMIRLLFNDVQTLKDGRHPQGEQMYRRVYRLHERLVAIRTEYNLRLKAGVGAPVTQVTLQSTQRRPELEDSTLRYLHDLLAWVEENQRRIDGAEWGVDLPSVEAQLGSHRGMHQSIEEFRAKIERARNDESQLSPATRGAYRDCLGRLDLQYAKLLNSSKARLRSLESLHGFVAAATKELMWLNEKEEEEVGFDWSDRNTNMAAKKESYSALMRELEMKEKKIKEIQNTGDRLLREDHPARPTVESFQAALQTQWSWMLQLCCCIEAHLKENTAYFQFFSDVREAEEQLQKLQETLRRKYSCDRSITVTRLEDLLQDAQDEKEQLNEYKGHLSGLAKRAKAIVQLKPRNPAHPVRGHVPLLAVCDYKQVEVTVHKGDQCQLVGPAQPFHWKVLSSSGSEAAVPSVCFLVPPPNQEAQEAVARLEAQHQALVTLWHQLHVDMKSLLAWQSLNRDIQLIRSWSLVTFRTLKPEEQRQALRNLELHYQAFLRDSQDAGGFGPEDRLVAEREYGSCSRHYQQLLQSLEQGEQEESRCQRCISELKDIRLQLEACETRTVHRLRLPLDKDPARECAQRIAEQQKAQAEVEGLGKGVARLSAEAEKVLALPEPSPAAPTLRSELELTLGKLEQVRSLSAIYLEKLKTISLVIRSTQGAEEVLKTHEEHLKEAQAVPATLQELEVTKASLKKLRAQAEAQQPVFNTLRDELRGAQEVGERLQQRHGERDVEVERWRERVTQLLERWQAVLAQTDVRQRELEQLGRQLRYYRESADPLSSWLQDAKSRQEQIQAVPIANSQAAREQLRQEKALLEEIERHGEKVEECQKFAKQYINAIKDYELQLITYKAQLEPVASPAKKPKVQSGSESVIQEYVDLRTRYSELTTLTSQYIKFISETLRRMEEEERLAEQQRAEERERLAEVEAALEKQRQLAEAHAQAKAQAELEARELQRRMQEEVTRREEAAVDAQQQKRSIQEELQHLRQSSEAEIQAKAQQVEAAERSRMRIEEEIRVVRLQLETTERQRGGAEDELQALRARAEEAEAQKRQAQEEAERLRRQVQDESQRKRQAEAELALRVKAEAEAAREKQRALQALDELKLQAEEAERWLCQAEAERARQVQVALETAQRSAEVELQSKRPSFAEKTAQLERTLQEEHVTVTQLREEAERRAQQQAEAERAREEAERELERWQLKANEALRLRLQAEEVAQQKSLAQADAEKQKEEAEREARRRGKAEEQAVRQRELAEQELEKQRQLTEGTAQQRLAAEQELIRLRAETEQGEHQRQLLEEELARLQHEATAATQKRQELEAELAKVRAEMEVLLASKARAEEESRSTSEKSKQRLEAEAGRFRELAEEAARLRALAEEARRHRELAEEDAARQRAEADGVLTEKLAAISEATRLKTEAEIALKEKEAENERLRRLAEDEAFQRRRLEEQAAQHKADIEERLAQLRKASESELERQKGLVEDTLRQRRQVEEEIMALKASFEKAAAGKAELELELGRIRSNAEDTMRSKELAEQEAARQRQLAAEEEQRRREAEERVQRSLAAEEEAARQRKVALEEVERLKAKVEEARRLRERAEQESARQLQLAQEAAQKRLQAEEKAHAFVVQQREEELQQTLQQEQNMLERLRSEAEAARRAAEEAEEAREQAEREAAQSRKQVEEAERLKQSAEEQAQAQAQAQAAAEKLRKEAEQEAARRAQAEQAALKQKQAADAEMEKHKKFAEQTLRQKAQVEQELTTLRLQLEETDHQKSILDEELQRLKAEVTEAARQRSQVEEELFSVRVQMEELGKLKARIEAENRALILRDKDNTQRFLEEEAEKMKQVAEEAARLSVAAQEAARLRQLAEEDLAQQRALAEKMLKEKMQAVQEATRLKAEAELLQQQKELAQEQARRLQADKEQMAQQLVEETQGFQRTLEAERQRQLEMSAEAERLKLRMAEMSRAQARAEEDAQRFRKQAEEIGEKLHRTELATQEKVTLVQTLEIQRQQSDQDAERLREAIAELEREKEKLKQEAKLLQLKSEEMQTVQQEQILQETQALQKSFLSEKDSLLQRERFIEQEKAKLEQLFQDEVAKAKQLQEEQQRQQQQMEQEKQELVASMEEARRRQREAEEGVRRKQEELQRLEQQRQQQEKLLAEENQRLRERLQRLEEEHRAALAHSEEIATSQAAATKALPNGRDALDGPSMEAEPEYTFEGLRQKVPAQQLQEAGILSMEELQRLTQGHTTVAELTQREDVRHYLKGGSSIAGLLLKPTNEKLSVYTALQRQLLSPGTALILLEAQAASGFLLDPVRNRRLTVNEAVKEGVVGPELHHKLLSAERAVTGYKDPYTGEQISLFQAMKKDLIVRDHGIRLLEAQIATGGIIDPVHSHRVPVDVAYQRGYFDEEMNRVLADPSDDTKGFFDPNTHENLTYLQLLERCVEDPETGLRLLPLTDKAAKGGELVYTDTEARDVFEKATVSAPFGKFQGKTVTIWEIINSEYFTAEQRRDLLRQFRTGRITVEKIIKIVITVVEEHERKGQLCFEGLRALVPAAELLDSGVISHEVYQQLQRGERSVREVAEADEVRQALRGTSVIAGVWLEEAGQKLSIYEALRRDLLQPEVAVALLEAQAGTGHIIDPATSARLTVDEAVRAGLVGPEMHEKLLSAEKAVTGYRDPYSGQSVSLFQALKKGLIPREQGLRLLDAQLSTGGIVDPSKSHRVPLDVAYARGYLDKETNRALTSPRDDARVYLDPSTREPVTYSQLQQRCRSDQLTGLSLLPLSEKAVRARQEEVYSELQARETLEKAKVEVPVGGFKGRALTVWELISSEYFTEEQRQELLRQFRTGKVTVEKVIKILITIVEEVETQRQERLSFSGLRAPVPASELLASKILSRTQFEQLKDGKTSVKDLSEVGSVRTLLQGSGCLAGIYLEDSKEKVTIYEAMRRGLLRASTATLLLEAQAATGFLVDPVRNQRLYVHEAVKAGVVGPELHEKLLSAEKAVTGYKDPYSGSTISLFQAMKKGLVLRDHAIRLLEAQIATGGIIDPVHSHRLPVDVAYQRGYFDEEMNRVLADPSDDTKGFFDPNTHENLTYLQLLERCVEDPETGLRLLPLRGAEKTEVVETTQVYTEEETRRAFEETQIDIPGGGSHGGSSMSLWEVMQSDMIPEDQRARLMADFQAGRVTKERMIIIIIEIIEKTEIIRQQNLASYDYVRRRLTAEDLYEARIISLETYNLFREGTKSLREVLEMESAWRYLYGTGSVAGVYLPGSRQTLTIYQALKKGLLSAEVARLLLEAQAATGFLLDPVKGERLTVDEAVRKGLVGPELHDRLLSAERAVTGYRDPYTEQPISLFQAMKKELIPAEEALRLLDAQLATGGIVDPRLGFHLPLEVAYQRGYLNKDTHDQLSEPSEVRSYVDPSTDERLSYTQLLKRCRRDDNSGQMLLPLSDARKLTFRGLRKQITVEELVRSQVMDEATALQLQEGLTSIEEVTKNLQKFLEGTSCIAGVFVDATKERLSVYQAMKKGIIRPGTAFELLEAQAATGYVIDPIKGLKLTVEEAVRMGIVGPEFKDKLLSAERAVTGYKDPYSGKLISLFQAMKKGLILKDHGIRLLEAQIATGGIIDPEESHRLPVEVAYKRGLFDEEMNEILTDPSDDTKGFFDPNTEENLTYLQLMERCITDPQTGLCLLPLKEKKRERKTSSKSSVRKRRVVIVDPETGKEMSVYEAYRKGLIDHQTYLELSEQECEWEEITISSSDGVVKSMIIDRRSGRQYDIGDAITKNLIDRSALDQYRAGTLSITEFADMLSGNAGGFRSRSSSVGSSSSYPISSAVPRTQLASWSDPTEETGPVAGILDTETLEKVSITEAMHRNLVDNITGQRLLEAQACTGGIIDPSTGERFPVTEAVNKGLVDKIMVDRINLAQKAFCGFEDPRTKTKMSAAQALKKGWLYYEAGQRFLEVQYLTGGLIEPDTPGRVSLDEALQRGTVDARTAQKLRDVSAYSKYLTCPKTKLKISYKDALDRSMVEEGTGLRLLEAAAQSSKGYYSPYSVSGSGSTAGSRTGSRTGSRAGSRRGSFDATGSGFSMTFSSSSYSSSGYGRRYASGPSASLGGPESAVA

SEQ ID NO: 83 - DNA, 13350 bp, Cricetulus griseus
  CDS (1)..(13350)
atgcgtttccacaagctgcagaatgttcagattgccctggactatctccgacatcgccaggtgaagttagtgaacatcagaaatgatgacattgctgatggcaaccccaagctgacccttggcctgatctggaccatcatcctccacttccagatctcagacattcaggtgagcgggcagtcggaggacatgactgcaaaggaaaagctgctgctctggtcacagcgtatggtagagggctaccaaggcctgcgttgtgacaacttcaccaccagttggcgtgatggtcgtctcttcaatgctatcatccaccggcacaagcccatgctcattgacatgaacaaagtgtatcgtcagaccaacctggagaacctcgaccaggccttctccgtagcagagcgggacctgggagtcacaaggctcctggacccagaagatgtggatgtccctcagcccgatgagaagtctatcatcacctatgtttcatccctgtatgacgccatgccccgtgtgcccggcgcacagaatggggtgagggccaatgagctgcagctccgctggcaggagtaccgggagcttgtgttgctgcttctgcagtggatccggcaccatacagctgcctttgaggagcgcaagttcccctccagctttgaagagattgagatcctgtggtgccagtttttgaagttcaaggagacagagctcccggccaaggaggcagacaagagccggtccaaaggcatctaccagtctttggagggggcagtacaagcaggccagctccagatccctcctggcttccacccgctggacgtggaaaaggaatggggcaagctgcacgtggccatcctggagcgggagaagcagctccggggcgagtttgagaggctggagtgtcttcagagaatcgtcagcaaactgcagatggaggctgggctgtgtgaggaacagctgaaccaggccgactccctgctgcagtcggatattcggctgctggcctcaggcaaggtggctcagcgggctggggaagtggagcgagacctggacaaggctgatggcatgatccggctgttgttcaacgatgtgcagacccttaaagatgggcggcacccacagggtgaacagatgtaccggagggtgtatcgtctgcatgagcgcctggtagccatccgcactgagtacaacctccggctgaaggcaggagtggctgcccctgtgacccaggtgaccgtgcagagtacacagaggcgcccagagctggaggactctacactccgctacctgcaagacctgctggcgtgggtggaggagaaccagcgtcggatagacagtgctgagtggggtgtggacttgcccagcgtggaggcgcagctgggcagccaccggggcatgcatcagtctattgaggagtttcgggccaagatcgagcgggctcggaacgatgagagccagctctccccagccacccggggtgcctaccgagagtgcctgggccgcctagacctgcagtatgcaaagctgctgaactcctccaaggcccgcctccggtccctggagagcttgcacgggtttgtggcggctgccaccaaggagttgatgtggctgaatgagaaggaagaagaggaagtgggctttgattggagtgaccgaaacaccaacatggctgccaagaaggagagctactcggccctgatgcgtgagctggagatgaaggaaaagaaaatcaaggagacccagaacactggagaccggctgctgcgggaggaccaccacgcgcggcccacagtggagtccttccaggccgccctgcagacccagtggagctggatgctgcagctgtgctgctgcattgaggcacacttgaaagagaacaccgcctacttccagttcttctcagacgttcgggaggcggaggaacagctgcagaagcttcaggagaccatgcgcagggagtacagctgcgaccgctccatcaccgtcaccaggctggaggacctgctgcaggacgcccaggacgagagggagcagctgaatgagtacaaggggcacctctcaggcctggccaagcgggccaaggccattgtgcagttgaagccacgcaaccctgcccaccctgtgcggggccatgtgcccctgatggcggtgtgtgattataagcaggtggaggtgactgtgcacaagggtgaccagtgccagctcgtgggccctgcccagccgtcccactggaaggtgctccgcggacccagcagtgaggcggccgtgccctcggtgtgctttcttgtgccgccgcccaaccaggaggcccaggaagctgtcgctaggctggaggcccagcatcaggccctggtcacactgtggcaccagctgcatgtggacatgaagagccttctggcatggcagaatctcagtcgtgacatacagctcatccggtcctggtccctggtcacgttccgcacgctgaagccagaggagcagcgccaggccctgcgcaacctggagctgcactaccaggccttccttcgagacagccaggacgctggcggcttcgggcccgaggaccggctggtggcagagcgggagtacggatcttgcagccgccactaccagcagttactacaaagcctggagcagggcgagcaagaggagtctcgttgtcagcgatgcatctcggagctcaaggatattcggctgcaactggaggcctgtgagacccggaccgtgcaccgtctgcggctgcctctggacaaagagcctgcacgggagtgtgcccaacgcatcgctgagcagcagaaagcgcaagctgaggtggaagggctgggcaagggagtcgcccgcctctctgctgaggcggagaaagttctagcgctgccggaaccatcacccgctgctcccaccctgcgctcagagctggaactgaccctgggcaagctggagcaggtccgaagcttgtctgccatctacttggagaaactcaagaccatcagcttggtaattcgcagtacccagggggcggaggaggtgctcaaagcccacgaggagcagctcaaggaggcgcaggctgtgcctgccacgctccaagagcttgaagccaccaaggcctcactaaagaaactgcgggcccaggcagaagcacagcagcctgtattcgacaccctaagggatgagctgcggggggcacaggaagttggcgagcggctgcagcagcggcacggagagcgggacgtggaagtggagcgctggcgagagcgtgtcaatcagctgctggagcgctggcaggccgtgcttgcccagattgacgtgcggcagcgtgagctagaacagctggggcgccagcttcgctactaccgcgagagcgctgacccactgagctcctggctgcaggatgccaagaggcggcaagagcagatccaggctgtgccaatacccaacagccaggctgcacgggagcaactgcgccaggagaaggccctgctggaagagattgagcgtcacggtgagaaggtggaggagtgccagaagttcgccaagcagtacatcaacgccatcaaggactatgagctccagctggtcacctacaaggcacagcttgaacccgtggcctccccagccaagaagcccaaggttcagtctggatcggagagtgtcatccaagagtatgtggatctgcggacacgctacagtgagctgaccacactcacaagtcagtacatcaagttcatcagcgagaccctgcgccgcatggaagaggaagagaggctggctgagcaacagcgggcagaggagcgtgagcgactggctgagggagaggctgcgctggagaagcagcggcagctagctgaggcccacgcccaggctaaggcccaggcagagctggaggcgcaggagctgcagcggcgcatgcaggaggaggtggcacggcgtgaggaggcggcggtgaacgcgcagcagcagaagcgcagcatccaagaggagctgcagcacctgcggcagagctcagaggcagagatccaggccaaggcccagcaggtggaggctgcagagcgcagccggatgcgcattgaggaagagatccgagtggtgcgtctgcagctggagacaaccgagcgtcagcgtggaggggcagagggtgagctgcaggcgctgcgtgcacgggccgaggaggccgaagcccagaagcggcaggctcaggaggaagccgagcgcctgcgaagacaggtgcaggatgagagccagcgcaagaggcaggccgaggcagagctggccctgcgcgtgaaggcccaggccgaggcagctcaagagaagcagcgggccctgcaggccctggaggaactgcggctgcaggccgaggaggctgaacggcggctgcgccaggcccaggcggagagagcgcgccaagtgcaggtagctctggagacggcgcagcgcagtgcggaggtggagctgcagagcaagcgtgcgtcctttgcggagaagacagcgcagctggagcgcacgctgcaggaagagcacgtgacagtgacccagctgcgcgagaaggccgagcgtcgggcccagcagcaagcggaggctgagcgagcccgcgaggaggctgagcgggagctggagcgctggcagctaaaggccaacgaagcgcttaggctgcggctgcaagcagaagaggtggcccagcagaggagtctggcgcaggccgatgcagagaagcagaaggaggaggccgagcgtgaggcccggcggcgcggcaaggccgaggaacaggccgtgcggcagcgagagctggccgagcaggagctggagaagcagcggcagctggcggagggcaccgcgcagcagcgcctggctgcggagcaggagctcatccgcctgcgggccgagacggagcagggtgagcagcagcggcagctgctggaggaggagctggcccggctgcagcgggaagcgaccgcagccacgcacaagcgccaggagctggaggccgagctggccaaagtgcgggccgagatggaggtgctgctggccagcaaggcgcgagccgaggaagagtcccgttctaccagcgagaagtccaagcagaggctagaggccgaggccgaccgctttcgagagctggccgaggaggctgcgcgtctgcgcgccctggcggaggaggccaagcggcagcggcagctggctgaggaggacgcagcgcgccagcgggccgaggcagagcgagtgcttacggagaagctggccgccatcagtgaggccacgaggctcaagacggaggcagagattgccctcaaagagaaggaggccgagaatgagcgcctccggcgcctggctgaagacgaggccttccagcggcggcggctggaggagcaggcggccctgcacaaggccgacatagaggagcgcttggcccagctgcgcaaggcgtcggagagtgagctggagcgccagaagggcttggtggaggatacgctgcggcagcggcggcaggtggaggaggagatcctggcgctgaaggtgagctttgagaaagccgccgccggcaaggcggagctggagctggagctggggcgcatccgcagcagtgccgaggacacaatgcgcagcaaggagcaggcggagcaggaggcggcgcggcagcggcagctggcagccgaggaggagcagcggcgtcgggaggccgaggagcgcgtgcagaagagcctggccgctgaggaggaagccgcgcggcagcggaaggctgcactggaggaagtcgagcggctcaaggccaaggtggaggaagcgcggcgcctgcgagaacgagcagagcaggagtccgccaggcagctgcagctggcccaggaggctgcccagaagcgactgcaggcagaggagaaggcgcatgcctttgtggtgcagcagcgggaagaggagctgcagcagactctgcagcaggagcagagcatgctggagcggctgcggggtgaggcagaggcggcgcggcgagctgccgaggaggccgaggaggcccgggagcaggccgaacgggaggcggctcagtctcggaaacaagtggaagaggcggagcggctgaaacagtcggcggaggagcaggcccaggcccgggcccaggcccaggccgctgcagagaagctgcgtaaggaagctgagcaggaggcagcgcgtcgggcacaggcggagcaggcagcgttgaagcagaagcaagcagccgacgcggagatggagaagcacaagaagtttgcagagcagacgctgcggcagaaggcccaggtggagcaggagctgacgacgctgaggctgcagctggaggagactgaccaccagaagagcatcctggacgaggagctgcagcggctgaaggccgaggtgaccgaggctgcccggcagcgtagccaggtagaggaggagctcttctctgttcgcgtgcagatggaggagctgggcaagctcaaggcccgcattgaagccgaaaaccgggcactcatcctgcgtgacaaggacaacacccagcgcttcctggaggaggaggctgagaagatgaaacaggtggcggaggaggctgcgcggctgagtgtggctgcccaggaggcggcccggctgcggcagctggccgaggaagacctggcgcagcagcgggccctggcagagaagatgcttaaggagaagatgcaggcggtgcaggaagccaccaggctcaaggccgaggccgagctgctccagcagcagaaggagcttgctcaggagcaggcccggcggctgcaggaagacaaggagcagatggcccagcagttggtagaggagacgcagggtttccagcggacgctggaggtagagcggcagcggcagctggaaatgagcgcggaggccgagcgcctcaagctgcgcatggctgagatgagccgggcgcaggcccgtgcggaggaggatgcccagcgcttccggaagcaggctgaggagattggcgaaaagctgcaccgcactgaacttgctacgcaggagaaagtgacattggtgcagacgctggagatccagcgacaacagagcgatcacgatgccgagcgtctgagggaggccattgctgagctggagcgggagaaggagaagctcaagcaagaggccaaattgctgcagctgaagtctgaggagatgcagactgtgcagcaggagcagatcctgcaggagacgcaggcgctgcagaagagcttcctgtctgagaaggatagcctgctgcagcgggaacgcttcatcgagcaggagaaggccaagctggaacagcttttccaggacgaagtggcaaaagcgcagcagctccgggaggagcagcagcggcagcagcggcagatggagcaggagaaacaggagctggtggccagcatggaggaggccaggaggcggcagtgcgaggccgaggaggccgtgcggcgcaagcaggaggagctgcagcatctggagctgcagcggcagcagcaggagaagctgctggccgaggagaaccagaggctgcgagagcggctgcagcgcctggaggaggagcaccgggccgccctggctcactctgaggagattgcagctactcaggctgccgccgcgaaagccctgcccaatggccgcgacgcgctggatggcccgtccatggaggtggagcctgagcacgccttcgagggactgcgtcagaaggtgccggctctgcagctacgggaagcgggcattctgagcgcggaggaactgcagcggctggaacagggccacaccacagtggctgagctctcgcagagggaagatgtgcgccagtacctgcagggccgcagcagcattgcggggctgctgctaaagcccaccgatgagaaactgagtgtctacacagccctgcagaggcagctgcttagccccggaacagctcttatccttcttgaggcccaggcggcctcaggcttcctgctggaccctgtgcggaaccggcggctgactgtcaacgagcccgtgaaggagggcgtcgtgggtcctgagctgcaccacaagctcctgtcagccgagcgcgctgtcactggctacaaggacccctacacgggggagcagatctccctcttccaggccatgaagaaggacctcctcgtcagggaccacgccatccggctgctggaggcccagatcgccacggggggcatcatcgacaccgtgcacagccaccgcgtgcccgtggacgtggcctaccagcgcggctacttcgacgaggagatgagccgcatcctggctgaccctggggacgacaccaagggcttcttcgaccccaacacgcatgagaacctcacctacctgcagctgctggagcgctgcgtggaggaccccgagacgggcctgcacctcctgccgctcacagataaggccgccaagggtggtgagctggtgtacacggatacagaggcccgtgacgtctttgagaaggccactgtgtctgcaccgtttggcaagttccagggcaagaccgtgaccatctgggagatcatcaactcagagtacttcacagcggagcagcggcgggatctgctgcggcagttccgcacgggccgcatcacggtggagaagatcatcaagattgtcatcacggtggtggaggagcaggagcggaagggccagctctgcttcgagggcctccgagccctcgtgcctgctgcggagctcctggagagcggggtcattagccacgaactctaccagcagctgcaaaggggggagcgttctgtgcgggaggtggccgaggcagacagcgtgagacgggccctgcggggtgccagcgtcattgcaggagtgtggctggaagaggcagggcagaagctgagcatctatgaggccttgaagaaagacttgctgcagccagacgtggctgtggccttgctggaggcccaggctggcactgggcacatcattgaccctgccactagtgcccggctgaccgtggatgaggcggtgcgcgccggcctagtgggtcccgagctgcatgagaagctcttgtcagctgagaaggctgtgacaggctatagggacccctactcgggacaaagcgtgtcactgttccaggccctgaagaagggcctcatcccccgagagcagggcctgcgcctgctggacgcccagttatccaccggcggcatggtagaccccagcaagagccaccgtgtgccactggatgttgcgtatgcccggggctacctggacaaggagaccaacagggccctgacgtcacccaggaatgatgccagagtctaccttgaccccagcagccaggagccagccacctacagccagctgcagcagcggtgccgtgctgaccagctgaccgggctgagcctgctgccagtctcggagaaggccgtccgggcccggcaggaggaggtctactctgagctccaggcccgtgagacgctggagaaggcccgagttgaggtccccgtgggcggttttaagggcaggacaatgacagtgtgggagctcataagctctgagtacttcacccaggagcagcggcaggagctgctgcggcagttccgcacaggcaaggtcaccgtagagaaagtcatcaggatcgtcatcaccatcgtggaggaggtggagacccagcggcaggagcgactgtcctttagtggcctccgtgcccctgtgccggccagtgagctcttggctgccaagatcctcagcagagctcagtttgaccagctcaaggaaggcaagacatcagtcaaagacctgtcagaggtgggctctgtgcggacactcctgcaaggcagcggctgcctcgctggcgtctacctggaggactctaaggagaaagtgaccatctatgaggccatgcgccggggcctcctcagacccagcacagccacactcctgctggaggcccaggctgccactggctttctggtggaccctgtgcggaaccagcgtctgtatgtgcatgaggctgtcaaggcgggagtcgtgggtcctgagctccatgagaagctcctgtccgctgagaaggcggtcaccggctataaggacccctactcaggcaccaccatctcactcttccaggccatgaagaagggcttggtcctcagggagcacgccatccgcctgctggaggcccagatcgccacggggggcatcatcgaccccgtgcacagccaccgcctgcccgtggacgtggcctaccagcgcggctacttcgacgaggagatgagccgcatcctggctgacccgagcgacgacaccaagggcttcttcgaccccaacacgcacgagaacctcacctacctgcagctgctggagcgctgcgtggaggaccccgagacgggcctgcgccttctgccgctcaaaggggcagagaagacagaggtggtggaaaccacacaggtgtatacggaggaggagactaggagggcgtttgaggagacgcagattgacatcccgggtggtggcagccacggtggctcctccatgtccctgtgggaggtgatgcagtcagacatgatcccagaggatcagcgagcccggctcatggctgacttccaggctggccgagtgaccaaggagcgtatgatcatcattatcattgagatcatcgagaagaccgagatcatccgccagcagaaccttgcctcctatgactacgtgcgccgccgcctcactgccgaggacctgtacgaggcccggatcatctccctcgagacctacaacctcttccgggaaggcaccaagagcctccgtgaagttctggagatggagtctgcctggcgctacctttatggcacagggtcagtggccggggtctacctgcctggctctcggcagacgctgaccatctaccaggcccttaagaaggggctgctgagtgctgaggtggcccgcttgttgctggaagcacaggcagccacaggcttcctgctggatccagtaaagggtgagcggctgaccgtggatgaggccgtgcggaagggtctggtaggccccgagctgcatgatcggctgctgtccgcagagcgggctgtgactggctaccgtgacccctataccgaacagaccatctcactcttccaggccatgaagaaggagctgatccctgctgaggaggcgctgaggctgctggacgcccagctagccacaggaggcattgtggacccccgcctggggttccacctccctctggaggtggcttaccaacgcggctacctcaataaggacacacatgaccagctgtcagagcccagtgaggtgcgcagctacgtggacccctccacggatgagcgcctcagctacacacagctgctcaagcggtgccgccgtgatgacggcagtggccagatgctcctgccgctctctgatgcccgcaggctgaccttccgaggcctgcgcaagcagatcactgtggaggagctggtgcgttctcaggtcatggacgaggccacggcgctacagctgcaagaaggcctgacctccatcgaggaggtcaccaagaccctgcagaagttccttgagggtaccagctgcatcgccggagtcttcgttgacgccaccaaggagcggctgtcagtgtaccaggccatgaagaagggcattatccgccccggcacggcctttgagctcctggaagcacaggcggccactggctatgtcattgaccctatcaagggactcaagctgactgtggaggaggctgtgcgcatgggtatcgtgggccccgagttcaaagacaggctgctgtcagccgagcgcgccgtcactggctacaaggatccctactctgggaaactcatctctctcttccaggccatgaagaagggcctaatcctgaaggaccacggcatccgtctgctggaggctcagatcgccactggcggcatcatcgaccccgaagagagccaccgcctacctgtggaagtggcctataagcgtggcctcttcgacgaggagatgaatgagatcctgaccgatccctcagatgacaccaagggcttctttgaccccaacacagaggagaacctcacctacctgcagctgatggagcgctgcatcactgacccccagactggcctgcgtctcctgccactgaaggagaagaagcgggagcggaagacgtcctccaagtcttcagtgcgtaagcgccgtgtggtgattgtggaccctgagacaagcaaggagatgtcggtgtacgaggcctaccgcaagggcctcattgaccaccagacgtacctggagctgtcagagcaggagtgcgagtgggaagaaatcaccatctcctcgtcagacggcgtggtcaaatctatgatcattgaccggcgctctggccgacagtatgacattgatgacgccatcaccgagaacctcattgaccgctccgcactggaccagtaccgtgcgggcacactttccatcactgagtttgctgacatgctctcgggcaatgctggcggcttccgctcccgctcctcctccgtgggttcatcatcttcctaccccatcagccctgccgtctcgaggacccagttggcttcctggtctgatcctaccgaggagaccggcccagtggctggcatcctggacacagagactctggagaaggtgtccatcacggaggccatgcaccgcaacctggtagacaacatcactggccagcggctgctggaggcacaggcctgcactgggggcatcatcgatcccagcacgggtgagcgcttcccagtcactgaggctgtcaacaagggcctggtagacaagatcatggtagaccgcatcaatctggcccagaaggccttctgtgggttcgaggacccacgcaccaagaccaagatgtcagccgcgcaggccctgaagaagggctggctgtactacgaggcaggccagcgcttcctggaggtgcagtacctaacgggtggtctgattgagcccgacacccctggccgtgtacccctcgatgaggccctgcaacgtggcaccgtggatgctcgcacggcccagaagctgcgtgacgtcagtgcctactccaagtacctcacgtgccccaagaccaagctcaagatctcctacaaggatgctttggaccgcagcatggtggaggagggcacggggctgaggctgttggaagccgcagcacagtccagcaagggctactacagtccctacagtgtcagcggctctggctccaccaccggttcacgcactggttcacgcaccggctcccgggccggctcccgccgtggcagctttgatgccactggctctggcttctccatgaccttctcgtcttcctcttactcttcctccgggtatggccgccgctacgcctcagggcctccagcctctttagggggtcctgagtccgcggtggcc

SEQ ID NO: 84 - protein, 4450 aa, Cricetulus griseus
MRFHKLQNVQIALDYLRHRQVKLVNIRNDDIADGNPKLTLGLIWTIILHFQISDIQVSGQSEDMTAKEKLLLWSQRMVEGYQGLRCDNFTTSWRDGRLFNAIIHRHKPMLIDMNKVYRQTNLENLDQAFSVAERDLGVTRLLDPEDVDVPQPDEKSIITYVSSLYDAMPRVPGAQNGVRANELQLRWQEYRELVLLLLQWIRHHTAAFEERKFPSSFEEIEILWCQFLKFKETELPAKEADKSRSKGIYQSLEGAVQAGQLQIPPGFHPLDVEKEWGKLHVAILEREKQLRGEFERLECLQRIVSKLQMEAGLCEEQLNQADSLLQSDIRLLASGKVAQRAGEVERDLDKADGMIRLLFNDVQTLKDGRHPQGEQMYRRVYRLHERLVAIRTEYNLRLKAGVAAPVTQVTVQSTQRRPELEDSTLRYLQDLLAWVEENQRRIDSAEWGVDLPSVEAQLGSHRGMHQSIEEFRAKIERARNDESQLSPATRGAYRECLGRLDLQYAKLLNSSKARLRSLESLHGFVAAATKELMWLNEKEEEEVGFDWSDRNTNMAAKKESYSALMRELEMKEKKIKETQNTGDRLLREDHHARPTVESFQAALQTQWSWMLQLCCCIEAHLKENTAYFQFFSDVREAEEQLQKLQETMRREYSCDRSITVTRLEDLLQDAQDEREQLNEYKGHLSGLAKRAKAIVQLKPRNPAHPVRGHVPLMAVCDYKQVEVTVHKGDQCQLVGPAQPSHWKVLRGPSSEAAVPSVCFLVPPPNQEAQEAVARLEAQHQALVTLWHQLHVDMKSLLAWQNLSRDIQLIRSWSLVTFRTLKPEEQRQALRNLELHYQAFLRDSQDAGGFGPEDRLVAEREYGSCSRHYQQLLQSLEQGEQEESRCQRCISELKDIRLQLEACETRTVHRLRLPLDKEPARECAQRIAEQQKAQAEVEGLGKGVARLSAEAEKVLALPEPSPAAPTLRSELELTLGKLEQVRSLSAIYLEKLKTISLVIRSTQGAEEVLKAHEEQLKEAQAVPATLQELEATKASLKKLRAQAEAQQPVFDTLRDELRGAQEVGERLQQRHGERDVEVERWRERVNQLLERWQAVLAQIDVRQRELEQLGRQLRYYRESADPLSSWLQDAKRRQEQIQAVPIPNSQAAREQLRQEKALLEEIERHGEKVEECQKFAKQYINAIKDYELQLVTYKAQLEPVASPAKKPKVQSGSESVIQEYVDLRTRYSELTTLTSQYIKFISETLRRMEEEERLAEQQRAEERERLAEGEAALEKQRQLAEAHAQAKAQAELEAQELQRRMQEEVARREEAAVNAQQQKRSIQEELQHLRQSSEAEIQAKAQQVEAAERSRMRIEEEIRVVRLQLETTERQRGGAEGELQALRARAEEAEAQKRQAQEEAERLRRQVQDESQRKRQAEAELALRVKAQAEAAQEKQRALQALEELRLQAEEAERRLRQAQAERARQVQVALETAQRSAEVELQSKRASFAEKTAQLERTLQEEHVTVTQLREKAERRAQQQAEAERAREEAERELERWQLKANEALRLRLQAEEVAQQRSLAQADAEKQKEEAEREARRRGKAEEQAVRQRELAEQELEKQRQLAEGTAQQRLAAEQELIRLRAETEQGEQQRQLLEEELARLQREATAATHKRQELEAELAKVRAEMEVLLASKARAEEESRSTSEKSKQRLEAEADRFRELAEEAARLRALAEEAKRQRQLAEEDAARQRAEAERVLTEKLAAISEATRLKTEAEIALKEKEAENERLRRLAEDEAFQRRRLEEQAALHKADIEERLAQLRKASESELERQKGLVEDTLRQRRQVEEEILALKVSFEKAAAGKAELELELGRIRSSAEDTMRSKEQAEQEAARQRQLAAEEEQRRREAEERVQKSLAAEEEAARQRKAALEEVERLKAKVEEARRLRERAEQESARQLQLAQEAAQKRLQAEEKAHAFVVQQREEELQQTLQQEQSMLERLRGEAEAARRAAEEAEEAREQAEREAAQSRKQVEEAERLKQSAEEQAQARAQAQAAAEKLRKEAEQEAARRAQAEQAALKQKQAADAEMEKHKKFAEQTLRQKAQVEQELTTLRLQLEETDHQKSILDEELQRLKAEVTEAARQRSQVEEELFSVRVQMEELGKLKARIEAENRALILRDKDNTQRFLEEEAEKMKQVAEEAARLSVAAQEAARLRQLAEEDLAQQRALAEKMLKEKMQAVQEATRLKAEAELLQQQKELAQEQARRLQEDKEQMAQQLVEETQGFQRTLEVERQRQLEMSAEAERLKLRMAEMSRAQARAEEDAQRFRKQAEEIGEKLHRTELATQEKVTLVQTLEIQRQQSDHDAERLREAIAELEREKEKLKQEAKLLQLKSEEMQTVQQEQILQETQALQKSFLSEKDSLLQRERFIEQEKAKLEQLFQDEVAKAQQLREEQQRQQRQMEQEKQELVASMEEARRRQCEAEEAVRRKQEELQHLELQRQQQEKLLAEENQRLRERLQRLEEEHRAALAHSEEIAATQAAAAKALPNGRDALDGPSMEVEPEHAFEGLRQKVPALQLREAGILSAEELQRLEQGHTTVAELSQREDVRQYLQGRSSIAGLLLKPTDEKLSVYTALQRQLLSPGTALILLEAQAASGFLLDPVRNRRLTVNEPVKEGVVGPELHHKLLSAERAVTGYKDPYTGEQISLFQAMKKDLLVRDHAIRLLEAQIATGGIIDTVHSHRVPVDVAYQRGYFDEEMSRILADPGDDTKGFFDPNTHENLTYLQLLERCVEDPETGLHLLPLTDKAAKGGELVYTDTEARDVFEKATVSAPFGKFQGKTVTIWEIINSEYFTAEQRRDLLRQFRTGRITVEKIIKIVITVVEEQERKGQLCFEGLRALVPAAELLESGVISHELYQQLQRGERSVREVAEADSVRRALRGASVIAGVWLEEAGQKLSIYEALKKDLLQPDVAVALLEAQAGTGHIIDPATSARLTVDEAVRAGLVGPELHEKLLSAEKAVTGYRDPYSGQSVSLFQALKKGLIPREQGLRLLDAQLSTGGMVDPSKSHRVPLDVAYARGYLDKETNRALTSPRNDARVYLDPSSQEPATYSQLQQRCRADQLTGLSLLPVSEKAVRARQEEVYSELQARETLEKARVEVPVGGFKGRTMTVWELISSEYFTQEQRQELLRQFRTGKVTVEKVIRIVITIVEEVETQRQERLSFSGLRAPVPASELLAAKILSRAQFDQLKEGKTSVKDLSEVGSVRTLLQGSGCLAGVYLEDSKEKVTIYEAMRRGLLRPSTATLLLEAQAATGFLVDPVRNQRLYVHEAVKAGVVGPELHEKLLSAEKAVTGYKDPYSGTTISLFQAMKKGLVLREHAIRLLEAQIATGGIIDPVHSHRLPVDVAYQRGYFDEEMSRILADPSDDTKGFFDPNTHENLTYLQLLERCVEDPETGLRLLPLKGAEKTEVVETTQVYTEEETRRAFEETQIDIPGGGSHGGSSMSLWEVMQSDMIPEDQRARLMADFQAGRVTKERMIIIIIEIIEKTEIIRQQNLASYDYVRRRLTAEDLYEARIISLETYNLFREGTKSLREVLEMESAWRYLYGTGSVAGVYLPGSRQTLTIYQALKKGLLSAEVARLLLEAQAATGFLLDPVKGERLTVDEAVRKGLVGPELHDRLLSAERAVTGYRDPYTEQTISLFQAMKKELIPAEEALRLLDAQLATGGIVDPRLGFHLPLEVAYQRGYLNKDTHDQLSEPSEVRSYVDPSTDERLSYTQLLKRCRRDDGSGQMLLPLSDARRLTFRGLRKQITVEELVRSQVMDEATALQLQEGLTSIEEVTKTLQKFLEGTSCIAGVFVDATKERLSVYQAMKKGIIRPGTAFELLEAQAATGYVIDPIKGLKLTVEEAVRMGIVGPEFKDRLLSAERAVTGYKDPYSGKLISLFQAMKKGLILKDHGIRLLEAQIATGGIIDPEESHRLPVEVAYKRGLFDEEMNEILTDPSDDTKGFFDPNTEENLTYLQLMERCITDPQTGLRLLPLKEKKRERKTSSKSSVRKRRVVIVDPETSKEMSVYEAYRKGLIDHQTYLELSEQECEWEEITISSSDGVVKSMIIDRRSGRQYDIDDAITENLIDRSALDQYRAGTLSITEFADMLSGNAGGFRSRSSSVGSSSSYPISPAVSRTQLASWSDPTEETGPVAGILDTETLEKVSITEAMHRNLVDNITGQRLLEAQACTGGIIDPSTGERFPVTEAVNKGLVDKIMVDRINLAQKAFCGFEDPRTKTKMSAAQALKKGWLYYEAGQRFLEVQYLTGGLIEPDTPGRVPLDEALQRGTVDARTAQKLRDVSAYSKYLTCPKTKLKISYKDALDRSMVEEGTGLRLLEAAAQSSKGYYSPYSVSGSGSTTGSRTGSRTGSRAGSRRGSFDATGSGFSMTFSSSSYSSSGYGRRYASGPPASLGGPESAVA

SEQ ID NO: 85 - DNA, 5268 bp, Homo sapiens
  CDS (1)..(5268)
atgaactcgctcttcaggaagagaaacaaaggcaaatacagccccactgtgcagacccggagcatctctaacaaggagctctcggagctgatcgagcagctgcagaagaatgccgaccaggtggagaagaacatcgtggacacagaggccaagatgcagagtgacctggctcggctgcaggagggtcggcagcctgagcaccgggacgtgaccctgcagaaggtgttggactctgagaagctgctctatgtgctagaggcggatgcggccattgccaagcacatgaagcacccacagggggacatgatcgccgaggatatccgccagctgaaggagcgtgtgaccaacctgcgcgggaaacacaagcagatctacaggctggcggtgaaggaagtggatccacaggtcaactgggcggcactggtggaggagaagctggacaagctgaacaaccagagctttgggactgacctgccgctggtggaccaccaagtggaggagcataacatcttccacaatgaggtcaaggccatcgggccccacctggccaaggacggggacaaggagcagaacagcgaactccgggccaagtaccagaaactgctggcagcatcacaggcccggcagcagcacctgagttcgctgcaggactacatgcagcgctgcaccaatgagctgtactggctggaccagcaggccaagggccgcatgcagtacgactggagtgaccgcaacctcgactaccccagccgccggcgccagtatgagaatttcatcaaccggaacctggaggccaaagaggagagaatcaacaaactgcacagcgagggcgaccagctgctggcggccgagcaccccgggaggaactccattgaggcgcacatggaggctgtgcacgcagactggaaggagtacctgaacctgctcatctgcgaggagagccacctcaagtacatggaggactaccaccagtttcacgaagacgtgaaggacgctcaggagctgctgcgcaaggtggactcggacctgaaccagaagtatggccctgacttcaaggaccggtaccagattgagctgctgctgcgggagctggatgaccaggagaaggtgctggacaagtatgaggacgtggtgcaggggctgcagaagcgaggccagcaggtggtgcccctcaagtaccgccgggagactccgctcaagcccatccccgtggaggcactctgtgactttgagggggagcagggcctgatctcgcggggctacagctacaccctgcagaagaacaacggggagagctgggagctcatggacagcgctgggaacaagctgattgctccggccgtctgttttgtgatcccccccacagaccctgaggccctggctctggctgacagcctgggcagccagtaccggagcgtgcggcagaaggcagctgggagcaaacgcacgctgcagcagcggtatgaggtgctgaagaccgagaatcccggagatgcctctgacctacaggggcggcagctgctggctggcttggacaaggtggccagcgacctggaccggcaggagaaggccatcacagggatcctgcggccaccactggagcaaggccgggctgtgcaggacagtgccgagcgggccaaggacctcaagaacatcaccaacgagctactgcggattgaacctgagaagacgcggagcacggctgagggcgaagccttcatccaggccctcccaggcagtggcaccacacccctgctgaggacccgggtggaggacaccaaccggaaatacgagcacctcctgcagctgctggacttggcccaggagaaggttgatgtggccaaccgcctggagaagagcctgcagcagagctgggagttgctggccacacacgagaaccatctgaatcaggatgacacagtgcctgagagcagccgtgtcctggacagcaaggggcaggagctggcggccatggcctgtgagttacaggcccagaagtccctcctgggtgaggtggagcagaacttgcaggcggccaagcagtgctcgagcacactggccagccgcttccaggagcactgcccggacctggagcgccaggaggccgaggtgcacaagctgggccagcgtttcaacaacctgcgccagcaggtggaacgcagggcgcagagcctacagagcgccaaggcagcctacgagcacttccaccgcggccatgaccacgtgctgcagttcctagtcagcatccccagttacgagccccaggagacagacagcctcagccagatggagaccaagctgaagaaccagaagaacctgctagatgagatagcaagtagggagcaggaagtacagaagatctgtgccaattcccagcagtaccagcaagctgtaaaggactatgagttagaagcagaaaaactaaggtctcttctcgacttggagaatggaaggagcagccacgtgagcaagagagccaggctccaatctcctgccaccaaagtgaaggaagaggaagcagcacttgccgccaagttcactgaagtttatgccatcaacagacagaggctgcagaatctggagtttgctctgaatctcctcagacagcagccggaagtagaagtgacccatgagaccctgcaaaggaataggccggactctggagtggaggaggcgtggaagatcaggaaggaactggatgaggagactgagcggaggcggcagctggagaacgaggtcaagagcacccaggaagaaatctggaccttgaggaatcaggggcctcaggaatcggtggtgaggaaggaggtgctcaagaaggtgccggatcccgtgctggaggagagcttccagcagctgcagcggacgctggcagaggagcagcacaagaaccagctgctgcaggaggagctggaggcactgcagctgcagctgcgtgccctggagcaggagaccagagacggggggcaggagtacgtggtcaaggaggtcctgcgcatcgagcctgacagggcccaggcggatgaggtcttgcagctgcgggaggagctggaggcactgaggcggcagaagggcgcccgggaggcagaggtgctcctcctgcagcagcgtgtggccgccctggctgaagagaagagccgggcgcaggagaaggtcacagagaaagaggtggtgaaactgcagaatgacccccagctggaggcagagtaccagcagctgcaggaggaccaccagcgccaggaccagctcagggagaagcaggaggaggagctgagcttcctccaggacaagctcaagaggctagagaaggagcgggccatggccgagggcaagatcaccgtcaaggaggtgctcaaggtggagaaggacgcggccaccgagagggaggtcagcgatctcacccgccaatatgaggacgaggctgccaaggctcgcgctagccagagggagaagacggagctgctccgaaagatatgggccttggaggaggagaacgccaaagtggtggtgcaggagaaggtgcgggagatcgtgcggccagaccccaaggcggaaagtgaagtggcgaacctccgcctggagcttgtggagcaggagcgaaagtaccggggtgccgaggagcagctccggagctaccagagtgagctggaggccctcaggaggcgaggcccccaggtggaagtcaaagaggtgactaaggaagtcattaagtacaagactgaccctgagatggagaaggagcttcagcggctcagggaggagatcgtggacaagaccagactgatcgaaaggtgtgatttagagatctaccagctgaaaaaggaaatccaggccctgaaagacaccaaaccccaggtccagaccaaagaggtggtccaggagatcctccaattccaagaagaccctcaaaccaaggaggaggtggcgtctctgagggcaaagctctcagaggagcagaagaaacaagtggatctggagagggaaagagcttcccaggaagagcagatcgcccggaaagaggaggagctctcgcgggtgaaggaaagggtggtgcagcaggaggtggtcaggtatgaggaggagccaggcctgcgggccgaggcgagcgcctttgccgagagcatcgatgtggagctgcggcagattgacaagctgcgggcagagctgcggcggctgcagcgccggcgcaccgagcttgagcggcagctggaggagctagagcgcgagcggcaggcccgcagggaggccgagcgcgaggtacagcggttgcagcagcggctggcagcgctggagcaggaagaagctgaggcccgtgagaaggtaacccatacgcagaaggtggtgctgcagcaggacccgcagcaggcgcgagagcatgccctgctccgactccagctggaagaagagcagcaccggcggcagctcctggagggggagctcgagaccctccggaggaaactggctgcactggagaaggcggaggtcaaggagaaggtggtgctctccgagagtgtccaggtggagaagggcgacaccgagcaagagatccagaggctcaagagcagcctggaggaggagagccgcagcaagcgcgagctggacgtcgaggtgagccggctggaagccaggctttcggagctggaattccataactccaagtcatccaaggaactagactttctgagggaagagaaccacaaattacagctggagaggcaaaacctgcagctggagacccgaaggctccaatcggaaatcaacatggcagcgacggaaacacgagacctgcggaacatgaccgtggcggactctgggaccaaccatgactccagactgtggtccctggagagggaactggatgacctcaagaggctctccaaggacaaagacctcgagatcgacgagctgcagaagcgcctgggctccgtggccgtcaagcgggagcagcgggagaaccacctgcggcgctccatcgtagtcatccaccctgacacaggccgcgagctgtccccggaggaagcccaccgtgccgggctcattgactggaacatgttcgtgaaactcagaagccaggagtgcgactgggaggagatctcagtgaagggtcccaatggggagtcctcagtgatacacgacaggaagtctggcaagaagttctccatcgaagaggccctgcagagtggcaggctgacccctgctcagtatgaccgctatgtcaacaaggatatgtccatccaggagctggcggtcttggtatctgggcagaag

SEQ ID NO: 86 - protein, 1756 aa, Homo sapiens
MNSLFRKRNKGKYSPTVQTRSISNKELSELIEQLQKNADQVEKNIVDTEAKMQSDLARLQEGRQPEHRDVTLQKVLDSEKLLYVLEADAAIAKHMKHPQGDMIAEDIRQLKERVTNLRGKHKQIYRLAVKEVDPQVNWAALVEEKLDKLNNQSFGTDLPLVDHQVEEHNIFHNEVKAIGPHLAKDGDKEQNSELRAKYQKLLAASQARQQHLSSLQDYMQRCTNELYWLDQQAKGRMQYDWSDRNLDYPSRRRQYENFINRNLEAKEERINKLHSEGDQLLAAEHPGRNSIEAHMEAVHADWKEYLNLLICEESHLKYMEDYHQFHEDVKDAQELLRKVDSDLNQKYGPDFKDRYQIELLLRELDDQEKVLDKYEDVVQGLQKRGQQVVPLKYRRETPLKPIPVEALCDFEGEQGLISRGYSYTLQKNNGESWELMDSAGNKLIAPAVCFVIPPTDPEALALADSLGSQYRSVRQKAAGSKRTLQQRYEVLKTENPGDASDLQGRQLLAGLDKVASDLDRQEKAITGILRPPLEQGRAVQDSAERAKDLKNITNELLRIEPEKTRSTAEGEAFIQALPGSGTTPLLRTRVEDTNRKYEHLLQLLDLAQEKVDVANRLEKSLQQSWELLATHENHLNQDDTVPESSRVLDSKGQELAAMACELQAQKSLLGEVEQNLQAAKQCSSTLASRFQEHCPDLERQEAEVHKLGQRFNNLRQQVERRAQSLQSAKAAYEHFHRGHDHVLQFLVSIPSYEPQETDSLSQMETKLKNQKNLLDEIASREQEVQKICANSQQYQQAVKDYELEAEKLRSLLDLENGRSSHVSKRARLQSPATKVKEEEAALAAKFTEVYAINRQRLQNLEFALNLLRQQPEVEVTHETLQRNRPDSGVEEAWKIRKELDEETERRRQLENEVKSTQEEIWTLRNQGPQESVVRKEVLKKVPDPVLEESFQQLQRTLAEEQHKNQLLQEELEALQLQLRALEQETRDGGQEYVVKEVLRIEPDRAQADEVLQLREELEALRRQKGAREAEVLLLQQRVAALAEEKSRAQEKVTEKEVVKLQNDPQLEAEYQQLQEDHQRQDQLREKQEEELSFLQDKLKRLEKERAMAEGKITVKEVLKVEKDAATEREVSDLTRQYEDEAAKARASQREKTELLRKIWALEEENAKVVVQEKVREIVRPDPKAESEVANLRLELVEQERKYRGAEEQLRSYQSELEALRRRGPQVEVKEVTKEVIKYKTDPEMEKELQRLREEIVDKTRLIERCDLEIYQLKKEIQALKDTKPQVQTKEVVQEILQFQEDPQTKEEVASLRAKLSEEQKKQVDLERERASQEEQIARKEEELSRVKERVVQQEVVRYEEEPGLRAEASAFAESIDVELRQIDKLRAELRRLQRRRTELERQLEELERERQARREAEREVQRLQQRLAALEQEEAEAREKVTHTQKVVLQQDPQQAREHALLRLQLEEEQHRRQLLEGELETLRRKLAALEKAEVKEKVVLSESVQVEKGDTEQEIQRLKSSLEEESRSKRELDVEVSRLEARLSELEFHNSKSSKELDFLREENHKLQLERQNLQLETRRLQSEINMAATETRDLRNMTVADSGTNHDSRLWSLERELDDLKRLSKDKDLEIDELQKRLGSVAVKREQRENHLRRSIVVIHPDTGRELSPEEAHRAGLIDWNMFVKLRSQECDWEEISVKGPNGESSVIHDRKSGKKFSIEEALQSGRLTPAQYDRYVNKDMSIQELAVLVSGQK

SEQ ID NO: 87 - DNA, 5265 bp, Mus musculus
  CDS (1)..(5265)
atgcactcgctcttcaggaagagaaacaaaggcaaatacagcccaacggtgcagacgcggagcatctccaacaaggaactctcagatctgattgagcagctgcagaagaatgcagaccaggtggaaaggaacattgtggacaccgaggccaagatgcagagcgacttggcccggatgcaagaggggcagctccctgagcaccgggacgcggccctgcagaacgtgtctgactcagaaaagctgctgtacgtgctggaggcagattcggccatcgccaagcacatgaagcacccacagggggacatgatcgccgaggacatccgccagctgaaagagcgcgtgaccaacctgcgggggaaacacaagcagatgtacagcctggcagtgaaagaggccgacccgagagtcaactgggacacactggtggacgagaagctggacaagctgagcagccagagctttgggactgaccttcctctggtggatagccaggtggagcaacacaacatcttccacaatgaagtcaaagccatcgggccccacctggccaaggacaaggagcagaacagtgaactccaagccaagtatcagaagttgctgacagcatcacaggcacggcagcagcacctgagctcgctgcaggattacatgcagcgctgcaccaatgagctgtactggctggaccagcaagccaagggccgcatgcagtatgactggagcgaccgcaacctcgactaccccagccgccgccgccagtacgagaatttcatcaaccggaacctggaggccaaagaagaaagaatcaacaaactgcacactgaaggtgaccaactgctgacagctgagcacccagggaggaactccattgaggcacacatggaggctgtgcatgctgagtggaaggagtacctgaacctgctcatctgtgaggagagccatctgaaatacatggaagactaccaccaatttcacaaagacatgaaggatgctcaggagctgctacgcaaggtggactcagacttgaaccagaaatatagccctgacttcaaagaccggtatcagatagagctgttgcttcgggaactggatgaccaggagaaggctctggacaagtatgaggatgtggtgcgagggctgcagaggcgagggcagcaagtggtgccactcaagtaccgccgcgagacgccgctcaagcccatccctgtggaggctctctgtgactttgagagtgaccagggcctcatctcgcggggctatagctacacactgcagaagaacaacggggagagctgggagctgacagacagcactgggaagaagctggctgccccagccgtctgcttcatcattccccccaccgaccccgaggccttggctcttgctgacagcctgggcagccagtaccgaagtgtgaggcagaaggcgactgggagcaaacatgcactccagcagcggcatgaggtgctaaggacggagaaccctggagatgcctctgatcttcagggacgacagctgctggctggcttggacaaagtggccagtgacctggaccggcaggaaaaggctatcacagggatcctacggccaccacttgagcagggacgggcaattgaggatagtgcggagcgggccaagggtctcaagaacattaccaatgagctgctacagattgagccagagaagacgcagtgcacagccgagtgtgaagcctttgtgcaggccctcccggccagcggcaccgcacccttgctgaagacccgggtagaagacaccaaccagaaatatgagcgactagtatggttgctagaggcagcccaggagaaggtggacgtggccaaccgcctggagaacagtctgcagcggggcagggagctgctggcctcatacgagaacaggctgattcaggacgacacaatgcctgaaagtggtcatgtgttggacaggaagaggcaggagctggaggccatggcttctgagctgcaggcccacaagtccctcctgggtgaggtgggaaagaacctacaggtggccaagcagtgttccagctcactggccagccgcttccaagagcactgccctgacctggagcggcaggaggccgaggtgcacaagctcaaccaacgtttcaacaacctcagccagcaggtggaacggagggcccagagcctgcagagtgccagggctgcctacgatgaatactgcagtggttacaaccgtgtgctccagtttttggccaagactcccagttatgagccccaggagacagacagcctcggccagatggagaccaagctcaagaaccagaagaacttgcttgatgagctagcaagcagggaacaggaggtgcagaaggtctatgcagattcccagcagtaccagcaagcggtgaaggactatgaacttgaagcagagaagctaaggtccttgctggacctggagaatggacggaacagccatgtgaacaagagagccaggctgcagtctcctgctgccaaagtgaaggaagaggaagctgctcttgctgccaagttcacagaggttaatgccatcaacagacagaggctacagaatttggagtttgcactgaatctcttgagacagcaaccagaagcaggagtgacccatgagaccctacaagggggaaagctaagctctggcatggaggaaacatggaagattaagaaggaactggaggaggagatagagcgaaggcaacagctggaaaatgaggtcaagagtgcccaggaggaaatccagaccctgaaggatcaggggcctcaggagtcattggtgaggaaggaggtgctgaagaaggtgccagaccctgccctggaggagagcttccagcagctgcagcagacgctggctgaggaacagcacaagaaccagctattgcaggaggagctgggagcactgcagctccggctgcaggctctagagcaggagaccagggatgggggacaggagtatgtggtcaaggaggtcttgcgcattgagccagacagagcccaggaggatgaggtcttgcagcttcgggaggagctggaggcactgcggcgccagaaaggcgcccgagaggctgaagtgctactcttacagcagcgtgtagcagccctggctgctgagaagagcagggtgcaggaaaaggtcactgagagagaggtggtaaagctacagaatgacccccaactggaggcagaataccggaggctgcaggaggagcaccagcgggagggcacactcagggagaagcaggaggaggagctgagtttcctacaggctaagctcaggagactggagaaagaacgagccatggcagaaggcaagatcactgtcaaagaggtgctcaaggtagagaaagatgcagctgtggagagagaagtcaatgacctcacccgccagtatgaggacgaggctgccaaggcacgctctggccagcgggagaagacagaacttctcagaaagatatgggccctggaagaggaaaatgctaaggtggtggtacaggagaaggtccgagagatcgtgcggccagatcccaaggcagagagtgaagtggccaacctccgcctggagctggtggagcaggagcgcaaattcaggggtgctgaggagcagctgaagagctaccagagtgagctggaggccctacggaaccgtggaccacaggtagaagtcaaagaggtgaccaaagaggtcattaaatatacaactgacccagagacagagcaggaactccagaggctcagggaggagatcatggacaagaccaggttaatagaaaggtgtgacctagagatttaccagctgaagcaggagatccaggcccttaaggacaccaagccacaggtgcagactagagaggtagtccaggagatcctgcagttccaggaagacccccaaaccaagaaggaggtagagtctctgcgtatacagctgtcagaagaacagaagaaacaggtggacctggaaggggagcgggcatcccaggaagagaagatcaaacgcaaggaggaagagctggcacagcagaggaaggaaagggttgtacgccaggaggtagtacagtatgaagatgagccagatttgcgagctgaggtgactgccttcacaaacagcattgatgctgagctgcggcagattgataaactgcatgtggagctacggcggttacagcatcgccgagcagagctggagaggcagttggaggagctggagcgggagaggcaggcacgtagggcagccgagctggaggtacagaggctgcaacagcggctggctgcattggagcaggaggaggccaagactggtgagaaggtgacccacacacaaaaggtggtgctgcagcaggacccacagcagaccagggagcatgccctgctccgagcccagctggaggaagagcggcaccggaggcagctactggagggtgagcttgagccgctgcgtagaaagttggctgccctggagaaggcagagatcaaagaaaaggtggtcttctctgagagtgtccaggtagaaaaaggtgacactgagcaagagatccagcgcctcaagaagagcctggaagaggagagccagagcaagagggagctggattcagaggtgacccggctagaagccaagttatctgagctagaattctataattccaagtcatccaaggaactggacttcctgagagaagaaaaccacaagctacagctagagcggcaaaacctgcagctagagacccggagactccaatcagagattgagatggcagcaacagaaactcgagatctgaagaacataaccacgatagactctgggacccacctaaactctaggctgtggtccctagagaaggaactggatgacctcaagaagatgtccaaggacaaggatctggagatcgatgaactacagaggcgcctgggctctgtggctgtcaagagagagcagagggagaaccacctgaggcgctccatagtggtcatagaccctgacacaggtcgtgagctgtccccagaggaggctcaccgggctgggcttatcgactggaaaatgtttgtgaagctcagaagccaggagtgcgactgggaggagatatcagtgaaaggtcctaatggggagtcatcagtaattcatgacaggaagtcaggcaagaagttctccattgaggacgctcttcagagtggcaggctaaccgctgctcaatatgaccgctatgtcaacaaggatatgtccattcaggagctggcagtcttggtgtctgggcagaag

SEQ ID NO: 88 - protein, 1755 aa, Mus musculus
MHSLFRKRNKGKYSPTVQTRSISNKELSDLIEQLQKNADQVERNIVDTEAKMQSDLARMQEGQLPEHRDAALQNVSDSEKLLYVLEADSAIAKHMKHPQGDMIAEDIRQLKERVTNLRGKHKQMYSLAVKEADPRVNWDTLVDEKLDKLSSQSFGTDLPLVDSQVEQHNIFHNEVKAIGPHLAKDKEQNSELQAKYQKLLTASQARQQHLSSLQDYMQRCTNELYWLDQQAKGRMQYDWSDRNLDYPSRRRQYENFINRNLEAKEERINKLHTEGDQLLTAEHPGRNSIEAHMEAVHAEWKEYLNLLICEESHLKYMEDYHQFHKDMKDAQELLRKVDSDLNQKYSPDFKDRYQIELLLRELDDQEKALDKYEDVVRGLQRRGQQVVPLKYRRETPLKPIPVEALCDFESDQGLISRGYSYTLQKNNGESWELTDSTGKKLAAPAVCFIIPPTDPEALALADSLGSQYRSVRQKATGSKHALQQRHEVLRTENPGDASDLQGRQLLAGLDKVASDLDRQEKAITGILRPPLEQGRAIEDSAERAKGLKNITNELLQIEPEKTQCTAECEAFVQALPASGTAPLLKTRVEDTNQKYERLVWLLEAAQEKVDVANRLENSLQRGRELLASYENRLIQDDTMPESGHVLDRKRQELEAMASELQAHKSLLGEVGKNLQVAKQCSSSLASRFQEHCPDLERQEAEVHKLNQRFNNLSQQVERRAQSLQSARAAYDEYCSGYNRVLQFLAKTPSYEPQETDSLGQMETKLKNQKNLLDELASREQEVQKVYADSQQYQQAVKDYELEAEKLRSLLDLENGRNSHVNKRARLQSPAAKVKEEEAALAAKFTEVNAINRQRLQNLEFALNLLRQQPEAGVTHETLQGGKLSSGMEETWKIKKELEEEIERRQQLENEVKSAQEEIQTLKDQGPQESLVRKEVLKKVPDPALEESFQQLQQTLAEEQHKNQLLQEELGALQLRLQALEQETRDGGQEYVVKEVLRIEPDRAQEDEVLQLREELEALRRQKGAREAEVLLLQQRVAALAAEKSRVQEKVTEREVVKLQNDPQLEAEYRRLQEEHQREGTLREKQEEELSFLQAKLRRLEKERAMAEGKITVKEVLKVEKDAAVEREVNDLTRQYEDEAAKARSGQREKTELLRKIWALEEENAKVVVQEKVREIVRPDPKAESEVANLRLELVEQERKFRGAEEQLKSYQSELEALRNRGPQVEVKEVTKEVIKYTTDPETEQELQRLREEIMDKTRLIERCDLEIYQLKQEIQALKDTKPQVQTREVVQEILQFQEDPQTKKEVESLRIQLSEEQKKQVDLEGERASQEEKIKRKEEELAQQRKERVVRQEVVQYEDEPDLRAEVTAFTNSIDAELRQIDKLHVELRRLQHRRAELERQLEELERERQARRAAELEVQRLQQRLAALEQEEAKTGEKVTHTQKVVLQQDPQQTREHALLRAQLEEERHRRQLLEGELEPLRRKLAALEKAEIKEKVVFSESVQVEKGDTEQEIQRLKKSLEEESQSKRELDSEVTRLEAKLSELEFYNSKSSKELDFLREENHKLQLERQNLQLETRRLQSEIEMAATETRDLKNITTIDSGTHLNSRLWSLEKELDDLKKMSKDKDLEIDELQRRLGSVAVKREQRENHLRRSIVVIDPDTGRELSPEEAHRAGLIDWKMFVKLRSQECDWEEISVKGPNGESSVIHDRKSGKKFSIEDALQSGRLTAAQYDRYVNKDMSIQELAVLVSGQK

SEQ ID NO: 89 - DNA, 6099 bp, Homo sapiens
  CDS (1)..(6099)
atgttcaaggggctgagcaaaggctcccaggggaaggggtcccccaagggctcccccgccaaggggtcccccaaaggctcccccagcaggcacagccgggctgccacccaggagctggcccttctcatctcccgcatgcaagccaacgccgaccaggtggagcgggacatcctggagacgcagaagaggctgcagcaggaccggctgaacagtgagcagagccaggccctgcagcaccagcaggagacgggccgcagcctgaaggaggctgaggtgctgctcaaggacctcttcctggacgtggacaaggcccggcggctcaagcacccgcaggctgaggagattgagaaggacatcaagcagctgcacgagcgggtgacccaggagtgtgcggagtaccgtgccctgtacgagaagatggtgctgccccccgacgtgggacccagggtcgactgggcacgcgtgctggagcagaaacagaagcaggtctgcgcaggccagtacgggccgggcatggcggagctggagcaacagatcgccgagcacaacatcctgcagaaggagatcgacgcctatgggcagcagctgcggagcctcgtggggccggatgcagccaccatccggagccaataccgagacctactgaaggcggcgtcgtggcgcgggcagagcctgggcagcctgtacacgcacctccagggctgcacgcggcagctgagcgccctggctgagcagcagcgccgcatcctgcagcaggactggagcgacctcatggccgaccctgcgggcgtgcggcgggagtacgagcacttcaagcagcacgagctgctgagccaggagcagagcgtgaaccagctggaggacgacggcgagcgcatggtggagctgcggcaccccgcggtggggcccatccaggcccaccaggaggccctgaagatggagtggcagaacttcctgaacctgtgtatctgccaggagacccagctgcagcacgtggaggactaccgccggttccaggaagaggccgactcagtcagccagaccctggcgaagctcaactccaacttggatgccaagtacagccctgcacctgggggcccccctggcgcccccacagagctgctgcaacagctggaggcagaggaaaaacggctggccgtcaccgagagggccactggggacctgcagcggcgaagccgggatgtggcccctctgccacagcgaagaaacccccctcagcagcccctgcacgtggacagcatctgcgactgggactcaggagaagtgcagctgctgcagggtgagcggtataagctggtagataacactgaaccgcacgcctgggtcgtgcagggccctggcggggagaccaagcgtgctcccgccgcctgcttctgcatcccagcaccagaccctgatgctgtggccagggcctcccggctggcctcagagctgcaggccctgaagcagaaattggccacagtccagagccgcctgaaggccagtgctgtggagtctcttcggcccagccagcaggctccatctggctcagacctggccaacccacaggcccagaagctcctgacacagatgacccggctggatggagacctgggacagatagagaggcaggtgctggcctgggcgcgggccccgctgagccgccccacacccttggaggacttggagggccgcatccacagccatgagggcacagcccagcgcctgcagagcctgggaacggagaaggagacagcccagaaggagtgcgaggcgtttctgtccacgcggcccgtgggccccgctgccctgcagctgcccgtagccctcaacagcgtgaagaacaagttcagtgacgtgcaggttctgtgcagcctctacggggagaaagccaaggctgccctggatctggagcggcagatccaggatgcggacagggtcatccgaggcttcgaggccaccctggtgcaggaggcccccatccctgctgaaccgggggctctgcaggagagggtcagcgagctgcagcgccagcggagggagctgctggaacagcagacctgcgtgctgcggctacaccgcgcgctgaaggcctcggagcacgcatgcgctgccctgcagaacaacttccaggagttctgccaagacctgcctcgccagcagcgccaggtgcgagccctcaccgaccgctaccacgccgtaggggaccagctggacctgcgggagaaggtggtgcaggatgccgccctcacctaccagcagttcaagaactgcaaggataacctgagctcctggctggagcacctgccccgcagccaggtgcggcccagcgacggccccagccagatcgcctacaagctgcaggcgcagaagaggctgacgcaggagatccagagccgagagcgggacagggccacagcatcccacctctcccaggccctgcaggcagcgctccaggactatgagctccaggcagacacctaccgctgctctttggagcccaccctggcagtgtcagcccccaagagaccccgagtggctcccctgcaagagagcatccaagcccaggagaagaaccttgcaaaggcctatactgaggttgcagcagcacagcagcagctgctccagcagctggagtttgctagaaaaatgctggagaagaaggagctcagtgaggacatccgaaggacccatgatgcaaagcagggctccgagagccctgcccaagcagggagagagtcagaggccctgaaggcccagctggaagaggagaggaagcgggtggcccgggtgcagcatgagctggaggcgcagaggagccaactgctgcagctgaggacccagcggcccttggagaggctggaggagaaggaagtggtagagttctaccgggacccccagctggagggcagcctgtccagggtgaaggcccaggtggaggaggagggcaagcggcgggctggcctgcaggcagacctggaagtggcagcccagaaggtcgtgcagctggaaagcaagaggaagaccatgcagcctcatctgctgaccaaggaggtcacccaggtggagagggaccccggcctggacagccaggcggcccagctcaggatccagatccagcagctccgcggggaggatgccgtcatctcggcccggctggaagggctgaagaaggagctactggcccttgagaagagggaggtggacgtgaaggagaaggtcgtggtgaaagaggtagtcaaggtggagaagaatctggaaatggtcaaggcagcccaggctctgaggctgcagatggaggaggatgctgcgcggaggaagcaggcggaggaggctgtggccaagctacaggctcgcatcgaagacctggagcgggctatcagctcggtggagcccaaggtcatcgtgaaggaggtgaagaaggtggagcaggacccagggctcctccaggagtcctccaggctgaggagcctcctcgaggaggagaggaccaagaacgcgacgctggccagggagctgagcgacctgcacagcaagtacagcgtggtggagaagcagaggcccaaagtgcagctccaggagcgcgtccacgagatcttccaggtggatccggagacagagcaggagatcactcggctcaaggccaagctgcaggagatggcgggcaagaggagcggtgtggagaaggaggtggagaagctgctgcccgacctggaggtcctgcgggcccagaagcccacggtggagtacaaggaggtgacccaggaggtggtgaggcatgagaggagccccgaggtgctgcgtgagatcgaccgcctgaaggctcagctcaacgagctcgtcaacagccacgggcgctcccaggagcagctcatccgcctgcagggtgagcgcgacgagtggaggcgcgagcgggccaaggtggagaccaagacggtgagcaaggaggtggtgcgccacgagaaggacccggtgctggagaaagaagcagagcggctccgccaggaggtgcgggaggcggcccagaagaggcgggccgcggaggacgcggtgtacgagctgcagagcaagcgcctgctgctggagaggaggaagcccgaggagaaggtggtggtgcaggaggtggtggtcacccagaaggacccgaagctgcgcgaggagcacagccggctgagcgggagcctggatgaggaggtgggccggcggcgccagctagagcttgaggtgcagcagctgcgggccggcgtggaggagcaggagggcctgctcagcttccaggaggaccgcagcaagaagctggccgtggagagggagctgcggcagctgaccttgaggatccaggagctcgagaagcggcctcccacggtgcaggagaagatcatcatggaggaagtggtcaagctggagaaggacccggacctggagaagtccacggaagccctgcggtgggacctggaccaggagaagacccaggtaaccgagctgaatcgggagtgcaagaacctgcaggtccagattgacgtcctccagaaagccaaatcgcaggagaagaccatctacaaggaagtgatccgggtgcagaaggaccgcgtcctggaagatgagcgggcccgcgtgtgggagatgctcaacagggagcgcacggcccggcaggcccgggaggaggaggcacggcgcctgcgggagcgcattgaccgggccgagacgctggggagaacctggtcccgggaggagtccgagctgcagagggcccgggaccaggccgaccaggagtgtgggcggctgcagcaggagctgcgggctctggagaggcagaagcagcagcagacactgcagctgcaggaggagtcgaagctgctcagccagaagacggagagcgagcgacagaaggcggcccagcggggccaggagctctcgcggctggaggcggccatcctccgcgagaaggaccagatctacgagaaggagcggacgctccgggacctccacgccaaggtgagccgggaggagctcagccaggagacccagacgcgagagaccaacctttccaccaagatctccatcctggaacccgagacggggaaggacatgtccccatacgaggcctacaagaggggcatcatcgacaggggccagtacttgcagctgcaggagctcgagtgtgactgggaggaggtcaccacctcggggccctgtggggaggagtctgtgctcctggaccgcaagagcgggaagcagtactccatcgaggccgccctccgctgccggcgcatctctaaggaggagtaccatctgtacaaggacggccacctgcccatctccgagtttgcgctgcttgtagctggggagaccaagccaagctcctcactctccatcggctctatcatctccaagtccccgctcgcctccccggccccccagagcaccagtttcttctctcccagcttctctctcgggctcggtgatgacagcttccctatcgccgggatctatgacacaaccacagacaacaagtgcagcatcaagacggccgtggccaagaacatgctggaccccatcactgggcagaagctactggaggcccaggcggccacagggggcatcgtggacctgctcagccgtgagcgctactctgtgcacaaggcgatggagaggggcctgatcgagaacacctccacacagaggctgcttaacgcccagaaggccttcaccggcatcgaggaccccgtcaccaagaagaggctctcggtgggcgaggccgtccagaagggctggatgccccgggagagcgtgctcccacacctgcaggtgcagcacctgaccggggggctcatcgaccccaagaggacaggccgcatccccatccagcaggccctcctctccgggatgatcagtgaagagctggcccagctcctgcaggacgagtccagctacgagaaggatttgacagaccccatctccaaggaacggctgagctacaaggaggccatgggccgctgccgcaaagaccccctgagcggcctgctgctcctgccagcggcactggaggggtaccgctgctaccgctccgcctcccccaccgtcccgcgctcccttcgc

SEQ ID NO: 90 - protein, 2033 aa, Homo sapiens
MFKGLSKGSQGKGSPKGSPAKGSPKGSPSRHSRAATQELALLISRMQANADQVERDILETQKRLQQDRLNSEQSQALQHQQETGRSLKEAEVLLKDLFLDVDKARRLKHPQAEEIEKDIKQLHERVTQECAEYRALYEKMVLPPDVGPRVDWARVLEQKQKQVCAGQYGPGMAELEQQIAEHNILQKEIDAYGQQLRSLVGPDAATIRSQYRDLLKAASWRGQSLGSLYTHLQGCTRQLSALAEQQRRILQQDWSDLMADPAGVRREYEHFKQHELLSQEQSVNQLEDDGERMVELRHPAVGPIQAHQEALKMEWQNFLNLCICQETQLQHVEDYRRFQEEADSVSQTLAKLNSNLDAKYSPAPGGPPGAPTELLQQLEAEEKRLAVTERATGDLQRRSRDVAPLPQRRNPPQQPLHVDSICDWDSGEVQLLQGERYKLVDNTEPHAWVVQGPGGETKRAPAACFCIPAPDPDAVARASRLASELQALKQKLATVQSRLKASAVESLRPSQQAPSGSDLANPQAQKLLTQMTRLDGDLGQIERQVLAWARAPLSRPTPLEDLEGRIHSHEGTAQRLQSLGTEKETAQKECEAFLSTRPVGPAALQLPVALNSVKNKFSDVQVLCSLYGEKAKAALDLERQIQDADRVIRGFEATLVQEAPIPAEPGALQERVSELQRQRRELLEQQTCVLRLHRALKASEHACAALQNNFQEFCQDLPRQQRQVRALTDRYHAVGDQLDLREKVVQDAALTYQQFKNCKDNLSSWLEHLPRSQVRPSDGPSQIAYKLQAQKRLTQEIQSRERDRATASHLSQALQAALQDYELQADTYRCSLEPTLAVSAPKRPRVAPLQESIQAQEKNLAKAYTEVAAAQQQLLQQLEFARKMLEKKELSEDIRRTHDAKQGSESPAQAGRESEALKAQLEEERKRVARVQHELEAQRSQLLQLRTQRPLERLEEKEVVEFYRDPQLEGSLSRVKAQVEEEGKRRAGLQADLEVAAQKVVQLESKRKTMQPHLLTKEVTQVERDPGLDSQAAQLRIQIQQLRGEDAVISARLEGLKKELLALEKREVDVKEKVVVKEVVKVEKNLEMVKAAQALRLQMEEDAARRKQAEEAVAKLQARIEDLERAISSVEPKVIVKEVKKVEQDPGLLQESSRLRSLLEEERTKNATLARELSDLHSKYSVVEKQRPKVQLQERVHEIFQVDPETEQEITRLKAKLQEMAGKRSGVEKEVEKLLPDLEVLRAQKPTVEYKEVTQEVVRHERSPEVLREIDRLKAQLNELVNSHGRSQEQLIRLQGERDEWRRERAKVETKTVSKEVVRHEKDPVLEKEAERLRQEVREAAQKRRAAEDAVYELQSKRLLLERRKPEEKVVVQEVVVTQKDPKLREEHSRLSGSLDEEVGRRRQLELEVQQLRAGVEEQEGLLSFQEDRSKKLAVERELRQLTLRIQELEKRPPTVQEKIIMEEVVKLEKDPDLEKSTEALRWDLDQEKTQVTELNRECKNLQVQIDVLQKAKSQEKTIYKEVIRVQKDRVLEDERARVWEMLNRERTARQAREEEARRLRERIDRAETLGRTWSREESELQRARDQADQECGRLQQELRALERQKQQQTLQLQEESKLLSQKTESERQKAAQRGQELSRLEAAILREKDQIYEKERTLRDLHAKVSREELSQETQTRETNLSTKISILEPETGKDMSPYEAYKRGIIDRGQYLQLQELECDWEEVTTSGPCGEESVLLDRKSGKQYSIEAALRCRRISKEEYHLYKDGHLPISEFALLVAGETKPSSSLSIGSIISKSPLASPAPQSTSFFSPSFSLGLGDDSFPIAGIYDTTTDNKCSIKTAVAKNMLDPITGQKLLEAQAATGGIVDLLSRERYSVHKAMERGLIENTSTQRLLNAQKAFTGIEDPVTKKRLSVGEAVQKGWMPRESVLPHLQVQHLTGGLIDPKRTGRIPIQQALLSGMISEELAQLLQDESSYEKDLTDPISKERLSYKEAMGRCRKDPLSGLLLLPAALEGYRCYRSASPTVPRSLR

SEQ ID NO: 91 - DNA, 6108 bp, Mus musculus
  CDS (1)..(6108)
atgttcaaggggctgagcaaaggctcccaggggaaggggtcccccaagggctccccagccaaggggtcccctaaaggctcccccaacaagcacaatcgggctgcaacccaggaactggctctgctcatctcccgcatgcaagccaacgctgaccaggtggaaagagacattttggagacgcagaagaagctgcaacaggatcggcagaatggtgagcagaaccaggctttacaacaccagcaggagactggccgcaacctgaaggaagcggaggtactcctcaaagatctcttcctggatgtagacaaggcgcggcggctcaagcacccacaggctgaggagattgagaaagacatcaagcagctgcatgagcgggtgacccaggagtgctcggagtaccgtgctctgtatgagaagatggtacttccgcctgatgtggggcccagggtcgactgggcgcgtgtgttggagcagaaacagaatctggtccgtgagggccactatgggcctgggatggcagagctggaacagcaggtggccgagcacaacatcctgcagagagaaatcgaggcttacgggcagcagctgcggacgctggtgggaccggatgcaaacaccatcaggaaccaataccgtgagctgctgaaggcggcctcgtggcgccgacagagtctgggcagcctgtacacccacctgcaaggctgcacgaagcagctgagcgccctggccgatcaacaaggccgcatcctgcagcaggattggagtgacctcatgccggaccccgctggcgtgaggcgagagtatgaacacttcaagcagcatgagctgctggcccaggaacggaacataaaccagctggaagatgacgcagatcgcatggtggaacttgggcacccggccattgggcccatccaagtccaccaggaggccctcaagatggagtggcagaatttcctaaacctttgcatctgtcaggagagccagctgcaacgggtggaggactaccgtaggttccaggaagaggcggactcagtcagccagaccctggcaaagctcagctccaacctggataccaagtacggctttggcactggggactcctccggctcccccacagagctcctgctacagctggaggcagaggagaagcagctggccatagcagagagggctgttggagatctgcagcagcgaagccaggaggtggccccactgccacagcgcaggaacccatccaagcagcccctgcacgtggacagcatctgtgactgggactcgggagaagttcagctgcttcggggagagcggtgcacactcaaggataatgctgacccatacacgtggctggttcaaggccctggaggagagaccaaaagtgccccagctgcctgcctgtggatcccagcaccagaccctgaagctgtgggcaaagcctctaggctggccacggagctgcagaccctgaagcagaagctgtctacagagaagaaccgcctgaaggctgctgctgtggaacacttacagcctggccagcaggctccggcaggctcagcccccgctgacccacaaggtcagacgctcctgtcacagatgacccagctggatggggatctggggcagatagagaggcaggtgctgagctgggcccggagcccactgagccagtcttcttcactgaaggacctcgagggccgcatccacagctgtgagggcacagcacagcgccttcagagtctgggagcggagaaggaggcagcccagcaggagtgtgaggcgtttctgtctaccaagcctacgggttccgctgccgtgcaactgcccgtggtcttccacagtgtgaagaacagatacaatgatgtgcagagcctgtgccacctctatggggagaaagccaaggctgctctgggcctggagaagcagatccaggaggcagacagggtcatccaaggctttgaagccgccctggcacttgagggccccgtccccgaaggctctggggcactgcaggagagggtcagcgagctgcagcgccagcgcaaagaactccttcagcagcaggcctgtgtgctggggctgcaccgccagctgaaggccactgagcatgcgtgcagtgcgctgcagaacaatttccaagagttctgccaagacctgccgcgccagcagcgccaggttcgtgccctcactgaccgttaccacgctgtgggggaccagctggatttgagggagaagatagtacaggatgccagcctcacctaccagcagctcaggaacagcagggacaacctgagctcttggctggagcagctgccccaccaccgggtgcagcccagcgacgggccaagccagatttcctacaagctgcaagcacagaagagactgatacaagaaatcctggggcgcgagcaggaccaggccaccgtgtcccgcctcacccgggacctgcaggaggccctccaagactatgagctgcaagcagatacctaccgctgctccttagaacccgccttggcagtgtccgccccgaaagaactcagagtgatttccttgcaggagaacatccaggctcaggagaataaccttgcgaaggcttacactgaggttgccgcagctgagcagcagcagctgcgccagctggagtttgctaaaaagatgctcaggaagaaggaacttgatgaggacatccaagccatccacagcgcgagacagggatctgggagtccggcacacgcaaggacggcggagtcagaggtcctgaagacccagcttgaggaagagaggaagcgggtggctgaggtgcagcgtgacctggaggagcagaggcagcggctgctgcagctgaggacccagcagcctgtggcgcggctggaggagaaggaagtggtggaattctaccgggacccccagctggagagtaacctgtctcaggcagcatcccgggtggaggaagagggcaagaggcgggcccgcttgcaggccgagctggaggcggtggcccagaaggttgtccacttggagggcaagaggaagaccatgcaacttcacctgctgaccaaagaggtcacccaaatcgagagggaccctggcctggacagccaggttacccagctccacagtgagatgcaacggttgcgcggggagaacggcgtcctcacagccaggctggaagagctgaaggacgagctgctagccctggagcagaaggagatgaacgtgaaggagaaggtcgtggtgaaggaggtggtgaaggtggagaaggatctagaaatggttaaggcggcccagactctgaggctccagatcgaggaagatgctgcacggaggaagggggcgaaggagaccgttgccaagatacaggctcgcatcaaagacctggagcaggcgatcagctcagtggagcccaaggtcattgtgaaggaggtgaagaaggtagagcaggacccgggccttctcaaggaggcttccaggctgagaagcctcctggaggaggagaagaacaacaacgtcgcgttggccagggaactgcaggagctgcaggagaaatacagggtggtggaaaagcagaagcccaaggtgcagctgcaggagcgagtcagcgagatcttccaggtgctcccggagacagagcaggagatccggaggctccgggcccagctgcaggagacaggcagcaagaagagcggcgtggagcaggaggtagagaagctgctgcctgagctggaggtcctgcgggctcagaagcccgtggtggaatataaggaggtgactcaggaggtggtgaggcacgagaagaacccagaggtgctgcgggagatcgaccgtctcaaggctcagctcaacgaactggtcaacaccaacgggcgctctcaggagcagctcatccggctccagggcgaacgcgatgagtggaagcgggaaaggtccaaggtggagaccaagatggtgagcaaagaagtcgtgcggcacgagaaggatccggtgctggagaaggaggccgagaggctccggcaggaggtgcgggaggctgtccagaggaggcgagccacggaggatgctgtgtacgagctgcagaacaagttactgctgctggagaggaggcggcccgaggagcagatagtggtgcaggaggtggtggtcacccagaaggacccgaagctgcgcgaggagcacagccggctgagccgcagcttggatgaggaggtggggcgccggcggcagctggagctggaggtgcggcagctgggcgccagagttgaggaggaggaggccaggctcagcttcgaggaggatcgcagcaagaagctggccgccgagagggagctgcggcaactgaccctgaagatccaggagctggagaagcggccccctgccctgcaggaaaagatcatcatggaggaagtggtcaagttagagaaagatcctgacctggagaggtctacagaagctctgcggcgcgagctggatcaggagaagaaccgcgtgaccgagctgcaccgggagtgccagggtctgcaggttcaggtcgacctcctccagaaaactaaatcacaggagaagaccatatacaaggaagtgatcagggtcgagaaggacccggtgctggagggcgagagggcccgagtgtgggagatccttaaccgggagcgcgcagcccgcaagggccgggaggaggatgtccggagcttgcaggagcggatcgaccgagccgaggctctgaggaggtcctggtcccgcgaggaagctgagctccagagggcccgggaccaggcaagccaggactgcgggcggctgcagagacagctgcgggagctggagcagcagaaacagcagaaagcccggcagctacaggaggaggggaggctgcttagccagaagacggagagcgagcgccagaaggccgcccagtggagccaggcggtcacgcagctcgaggctgccattctccaggaaaaggacaagatctacgagaaagagaggaccctcagggacctgcacaccaaggtgagccgggaggagctcaaccaggagacccagacccgggagaccaacctctccaccaagatctgcatcttggaaccggagaccggcaatgacatgtctccttacgaggcctacaagaggggtgtcatcgacagaggccagtatctccagctgcaggagctggagtgtgactgggaagaagtcacaacctccagcccctgcggggaggagtctgtgctcctggaccgcaagagcgggaagcaatactccatcgaggccgccctccgctgccgccgcatttccaaagaagagtaccacaggtacaaagatggccgcctccccatctccgagtttgccctgcttgtggcaggggagaccaagccgagttcttcactctccattgggtccatcatctccaagtctccagtctgctccccaggcccccagagtaccggcttcttctccccaggcctctcttttgggctcactgaggatagcttccccatcgcggagatcttcgatacaaccacagacaacaagtgtagcatcaaggcagctgtggccaagaacatgctggatcctatcactgggcagaagctgttgaggcccaggcaagccacgggaggcattgttgaccttcttagccgagaacggtactccgtacacaaggcggtggagcggggactcattgagaacacctccactcaacggctgctcaatgctcagaaggccttcaccggcatcgaggaccctgtcaccaggaagaggctgtcggtgggtgaggccatccagaagggctggatgccccaggaaagcgtgcttccccacctgctggtacagcacctgactgggggcctcatcgaccccaagaggacgggacgcatccccgtccctcaggctgtgctctgcgggatgatcagcgaagacctgggccagctcctgcaagatgaatccggctacgagaaggatctgacagaccccatcaccaaggagaggctgagctacaaggaggccatggggcgctgccgcaaagatcctctaagtggcctactactgctccccgccatgctagaaggctatcgctgctaccgcgcggcctcccccaccctgccaagatcctgtgtgcgttga

SEQ ID NO: 92 - protein, 2035 aa, Mus musculus
MFKGLSKGSQGKGSPKGSPAKGSPKGSPNKHNRAATQELALLISRMQANADQVERDILETQKKLQQDRQNGEQNQALQHQQETGRNLKEAEVLLKDLFLDVDKARRLKHPQAEEIEKDIKQLHERVTQECSEYRALYEKMVLPPDVGPRVDWARVLEQKQNLVREGHYGPGMAELEQQVAEHNILQREIEAYGQQLRTLVGPDANTIRNQYRELLKAASWRRQSLGSLYTHLQGCTKQLSALADQQGRILQQDWSDLMPDPAGVRREYEHFKQHELLAQERNINQLEDDADRMVELGHPAIGPIQVHQEALKMEWQNFLNLCICQESQLQRVEDYRRFQEEADSVSQTLAKLSSNLDTKYGFGTGDSSGSPTELLLQLEAEEKQLAIAERAVGDLQQRSQEVAPLPQRRNPSKQPLHVDSICDWDSGEVQLLRGERCTLKDNADPYTWLVQGPGGETKSAPAACLWIPAPDPEAVGKASRLATELQTLKQKLSTEKNRLKAAAVEHLQPGQQAPAGSAPADPQGQTLLSQMTQLDGDLGQIERQVLSWARSPLSQSSSLKDLEGRIHSCEGTAQRLQSLGAEKEAAQQECEAFLSTKPTGSAAVQLPVVFHSVKNRYNDVQSLCHLYGEKAKAALGLEKQIQEADRVIQGFEAALALEGPVPEGSGALQERVSELQRQRKELLQQQACVLGLHRQLKATEHACSALQNNFQEFCQDLPRQQRQVRALTDRYHAVGDQLDLREKIVQDASLTYQQLRNSRDNLSSWLEQLPHHRVQPSDGPSQISYKLQAQKRLIQEILGREQDQATVSRLTRDLQEALQDYELQADTYRCSLEPALAVSAPKELRVISLQENIQAQENNLAKAYTEVAAAEQQQLRQLEFAKKMLRKKELDEDIQAIHSARQGSGSPAHARTAESEVLKTQLEEERKRVAEVQRDLEEQRQRLLQLRTQQPVARLEEKEVVEFYRDPQLESNLSQAASRVEEEGKRRARLQAELEAVAQKVVHLEGKRKTMQLHLLTKEVTQIERDPGLDSQVTQLHSEMQRLRGENGVLTARLEELKDELLALEQKEMNVKEKVVVKEVVKVEKDLEMVKAAQTLRLQIEEDAARRKGAKETVAKIQARIKDLEQAISSVEPKVIVKEVKKVEQDPGLLKEASRLRSLLEEEKNNNVALARELQELQEKYRVVEKQKPKVQLQERVSEIFQVLPETEQEIRRLRAQLQETGSKKSGVEQEVEKLLPELEVLRAQKPVVEYKEVTQEVVRHEKNPEVLREIDRLKAQLNELVNTNGRSQEQLIRLQGERDEWKRERSKVETKMVSKEVVRHEKDPVLEKEAERLRQEVREAVQRRRATEDAVYELQNKLLLLERRRPEEQIVVQEVVVTQKDPKLREEHSRLSRSLDEEVGRRRQLELEVRQLGARVEEEEARLSFEEDRSKKLAAERELRQLTLKIQELEKRPPALQEKIIMEEVVKLEKDPDLERSTEALRRELDQEKNRVTELHRECQGLQVQVDLLQKTKSQEKTIYKEVIRVEKDPVLEGERARVWEILNRERAARKGREEDVRSLQERIDRAEALRRSWSREEAELQRARDQASQDCGRLQRQLRELEQQKQQKARQLQEEGRLLSQKTESERQKAAQWSQAVTQLEAAILQEKDKIYEKERTLRDLHTKVSREELNQETQTRETNLSTKICILEPETGNDMSPYEAYKRGVIDRGQYLQLQELECDWEEVTTSSPCGEESVLLDRKSGKQYSIEAALRCRRISKEEYHRYKDGRLPISEFALLVAGETKPSSSLSIGSIISKSPVCSPGPQSTGFFSPGLSFGLTEDSFPIAEIFDTTTDNKCSIKAAVAKNMLDPITGQKLLRPRQATGGIVDLLSRERYSVHKAVERGLIENTSTQRLLNAQKAFTGIEDPVTRKRLSVGEAIQKGWMPQESVLPHLLVQHLTGGLIDPKRTGRIPVPQAVLCGMISEDLGQLLQDESGYEKDLTDPITKERLSYKEAMGRCRKDPLSGLLLLPAMLEGYRCYRAASPTLPRSCVR

SEQ ID NO: 93 - DNA, 6114 bp, Bos taurus
  CDS (1)..(6114)
atgttcaaggggttgagcaaaagctctcaggggaaggggtcccccaagggctccccggccaaaggctcccccaaggggtcccccaacaagcacagcagagctgccactcaggagctggccctgctgatctcccgcatgcaggccaacgccgaccaggtggagagggacattctggagacccagaagaagctgcagcaggaccggcagcacagcgagcagcgccaggccctgcagcaccggcaggaggtgggccgcagcctgaaggaggccgaggtgctgctgaaagacctcttcctggatgtggacaaggcccagcggctcaagcacccacaggccgaggagatcgagaaggacatcaagcagctgcacgagcgggtgacccaggagtgcgccgagtaccgcgccctgtacgagaagatggtgctgccgcccgatgtggggcccagggtcgactgggcgagggtgctggagcagaagcagaagcaggtctgcgagggccagtacgggccgggcatggcggagctggagcagcaggtcgccgaacacaatatcctgcagaaggagatcgaggcctacgggcagcagctgcggacccttgtagggccggacgcggccaccatccggagccaataccgggacctcctgaaggcggcctcgtggcgagggcagagcctgggcagcctgtacacgcacctgcagggctgcacgcgccagctgaacgccctggcccagcagcagcagcgcatcctccagcaagactggagcgaccacctggccgaccccgcgggcgtgcggagggagtacgagcacttcaagcagcacgagctgctgagccaggagcagcgcgtgaaccagctggaggacgacggggagcgcatggtggagctcgggcatccggccgtggggcccatccaggcccaccaggaggccctaaaggtggagtggcagaacttcctgaacctttgcatctgccaggagagccagctgcagcacgtggaggactaccgcaggttccaggaagaggcggattctgtcagccagaccctggcaaagctcaactccagcctggacagccagtacagccctgccccggagggcccacctggtgctctaatggagatgctgcggcagctggaggcagaggagaagcagctgaccatggccgaaaagactctcaaggacctgcagctgcaaagccagggggtggcccctctgccccagagaaggaacctgcccctgcagcccctgcgtgtggacagcatctgtgactgggactcaggagaagtgcagctgctgcggggtgagcagtatacactggtggacaacactgacccacacacctgggtggtccagggccaggcaggcgagcccaagcgggccccagccgcctgcttctgcatcccagctccggaccctgaagccgtggccagggcctccgggcttgcctcggagctgcaggcactgaagcagaaactgaccgcagtccagagccgcctgaaggccagtgccaaggagcccttacggcccagccagcaggctccaagcagctcgggcccacccgacccacaggcccagaagctcctgacacagatgacccggctggaagaggacctggggcagatagagaagcagctgctggcttgggcacgggccccgctgagccgcaccacaccactcgaggacctcgagggccgcatccagaaccaccagggcacggcccagcggctgcagagcctgggagcagagaaggaggcggcccagcagaagtgtgaggcgtttctgtcggggcagccctcagggcccgctgccctgcatctgcccgtggtcctcaacagcgtcaagaacaaatacagggatgtgcaggttctctgcagcctctacggggagaaagccaaggccgccctgggtctggaacggcagatccgggatgcagacaaggtcatccgaggcttcgagtctgccctggcacaggaggcccccatccccgcaggcccgggcgcactgcaggagagggtcagcgagctgaagcgccggcggagggagctgctggagcagcaggcctgtgtgctcgggctacaccgccagctgaaggctgtcgagcatatgtgcagcgcactgcagaacaatttctgcgagttctgcaaagacctgcctcaccagcagcgccaggtgcgggccctcaccgaccgctaccacgccgtgggggaccagttggacctgcgggagaagatgatgcaggatgccggcctcacctaccagcagttcaagaactgcacagacaacctgaacgcgtggctggagcgcctgccccacaacaaggtgcggcccagcgacgggcccagccagatcgcctacaagctgcaggcgcagaagacctgggttcaatccctgggtcgggaagatctcctggagaaggaaatggcaacccactccagtattcccagtctatgtccttccccacctgctcaggactatgagctgcaggcagacacctaccgaggttccctggagcccacccaggtgggatcggcccccaagagaccgcgagttgcgcccctgcaggacagcatccaagcccaggagaagaacctgacgaaggcctacactgaggtggcagctgcccaccagcagcaactgcaccagctggaatttgccagaaagattctggagaagaaagagctcaatgaggacatccaggtgacacctaacgcccagcaggggtctgagagcccagcccgggggggcaggaagtcagaggccctgaggtcccagctagaggaggagaggaagcgggtggcccaggtacaacgtgagctggaggagcagaggagccagttgctgcagctgaagacccagcggcccgtggagaaactggaggagaaggaagtggtggagttctaccgggatccccagctggagagcaacctgtccagggtgaagtcccaggtggaggacgagggcaagaagcaggctggcctgcaggcagacctggaggcagtggcccagaaggtcatgcagctggagagccagaggaaggccacggaacctcacctgctgaccaaggaggtcacccagatcgagagggaccccggcctggacagccaggcagcccagctcaagagtgagctccagctcctgcaagaggagaacaccgccgtcttggcccagctggaggcactgaaggcagagctgctggcccttgagcagaaggaggtgaacgtgaaagagacagtcgtggtgaaagaagtggtcaaggtggagaaggacctggagatgctccaggcagcccaggccctgaggctgaagattcaggaggatgtggcccagcggaaaggggcggaggatgccgtggccaagctgcaggctcgagtcgtggagctggaggcagcaatccgcactgtggagcccaaggtgattgtgaaggaggtgaagaaggtggaacaggaccccaggctcctccaggaggcatccaggctgaggagcctcctggaggtgcagaggagtgaaaacgaggtgctggccagggaggagctgaaggagctgcacagcaagcacagcgcggcggagaagcagaagccccgggtggatctgcaggagcgcgtacaggagaccttccgggtggacccggagacagagcgggagatcgcacagctccgggctgagctgcaggagactggccgcaagaggaatggcacggagcaggaggtggagcgactgctctctgagctggtggtgctgcgggcccagaagcccaccgtggagtacaaggaggtgacgcaggagctggtgcggcacgagaagaaccccgagctgctgcgggagatcgaccgcctgaaggcccagctcaatgagctggtcaacggcagtggacgggcccaggagcagctcatccggctgcagggggagcgcgacgagtggcggcgcgaacgctccaaggtcgagaccaagacggtgaacaaggaggtggtgcgccgtgagaaggaccccgtcctggagcaggaagcccagcggctgcgccaggaggtgcgggaggccactcagaagcggcgggcggccgaggacgccgtccaccagctgcagaacaagtacctgctgctggagaggcggcggcctgaggagagggtggtggtgcaggaggtggtggtcacccagaaggacccgaagctccatgaggagcacagccggctgagccagagcttggatgaggaggccggccggcggcggcagctggaacgggaggtgcagcagctgcaggccgccgtgcaggaggacgagggccgactcagcttccgggaggaccgtagtaagaagctggctgtggagagggagctgcggcagctgaccctgaagctccaggagctggagaagcggcctccggcagtgcaggagaagatcatcatggaggaggtagtccagctggagaaggacccggacctggagaagtccacggcggccctccggcaagacctggcccaggagaagacccaggcgaccgaggtgcatcgggagtgcaagaaccttcaggtgcagatcgacgtgctccagaagacgaagctgcaggagaagaccatctacaaggaagtgatcagggtggagaaggaccccgtgctggagggagagcgtgcccgggtgtgggaggcgctcaaccgggagcgcgcggcccgggagagccgggaggaggaggtgaggcgcctgcgggagcgggtggagcgggccgaggcgctggggaggacctgggctcgggaggaggccgagctccagaagacccgggaccgggcaagccaggagtgcaggcagctgcagcaggagctgcgggagctggaaaggcagaagcagcagcgggtgctgcacctgcaggaggagtccaagctgctcagccagaagacggagagcgagcggcagagggcagcccagcggggccaggaactctcgcagctcgagtcggccatcctccgcgagaaggaccggatctatgagaaggagcggaccctgcgggacctccacacccaggtgagccgggaggagctcaaccaggagacccagacacgagagaccaacatctccaccaagatctccatcctggagcccgagacggggaaggacatgtccccatacgaggcctacaagaggggcgtcattgaccgaagccagtacctccagctgcaggatctcgagtgtgactgggaggaggtcaccacctcgggcccccacggggaggagtctgtgctcctggaccgcaagagcgggaaacagtactccatcgaggccgccctgcgcagccggcgcatctccaaagaggagtaccatctctacaaggatggccagctccccatcagcgaattcgctctgctcgtggccggggagaccaagccctgcccctccctctccatcggcgccatcatctccaagtccccgctggcctccccggcctcccagagcaccagtctcttctcccccagcttctctctcgggcttagcgaggacagcttccccatcgccggtgtctatgacacgaccacagacaacaagtgcaccatcaagacggccgtggccaagaacatgctggaccccatcaccgggcagaagctgctggaggctcaggcggccacggggggcattgtggacctcctgagccgggagcgctactccgtgcacaaggcggtggagcgggggctgatcgagagcggctcaacccagaggctgctcaacgcacagaaggccttcacgggcattgaggaccccgtgaccaagaagaggctgtcggtgggcgaggccgtccagaagggctggatgccccaggaaagcgtgctcccacacctgcgggtgcagcacctgaccggggggctcatcgaccccaagaagaccggccgcatccccgtggctcaggctgtgctctctggcatgatcagcgaggagctggcccagctcctgcaagacgaggccagttacgagaaggacttgacagatcccatttccaaggagcgactgagctacagggaggccatggggcgttgccggaaggaccccctgagcggcctgctgctcctcccagcctcgctagaggggtaccgctgctaccgctcggcctcccccactgtcccgcgctccctgcgt

SEQ ID NO: 94 - protein, 2038 aa, Bos taurus
MFKGLSKSSQGKGSPKGSPAKGSPKGSPNKHSRAATQELALLISRMQANADQVERDILETQKKLQQDRQHSEQRQALQHRQEVGRSLKEAEVLLKDLFLDVDKAQRLKHPQAEEIEKDIKQLHERVTQECAEYRALYEKMVLPPDVGPRVDWARVLEQKQKQVCEGQYGPGMAELEQQVAEHNILQKEIEAYGQQLRTLVGPDAATIRSQYRDLLKAASWRGQSLGSLYTHLQGCTRQLNALAQQQQRILQQDWSDHLADPAGVRREYEHFKQHELLSQEQRVNQLEDDGERMVELGHPAVGPIQAHQEALKVEWQNFLNLCICQESQLQHVEDYRRFQEEADSVSQTLAKLNSSLDSQYSPAPEGPPGALMEMLRQLEAEEKQLTMAEKTLKDLQLQSQGVAPLPQRRNLPLQPLRVDSICDWDSGEVQLLRGEQYTLVDNTDPHTWVVQGQAGEPKRAPAACFCIPAPDPEAVARASGLASELQALKQKLTAVQSRLKASAKEPLRPSQQAPSSSGPPDPQAQKLLTQMTRLEEDLGQIEKQLLAWARAPLSRTTPLEDLEGRIQNHQGTAQRLQSLGAEKEAAQQKCEAFLSGQPSGPAALHLPVVLNSVKNKYRDVQVLCSLYGEKAKAALGLERQIRDADKVIRGFESALAQEAPIPAGPGALQERVSELKRRRRELLEQQACVLGLHRQLKAVEHMCSALQNNFCEFCKDLPHQQRQVRALTDRYHAVGDQLDLREKMMQDAGLTYQQFKNCTDNLNAWLERLPHNKVRPSDGPSQIAYKLQAQKTWVQSLGREDLLEKEMATHSSIPSLCPSPPAQDYELQADTYRGSLEPTQVGSAPKRPRVAPLQDSIQAQEKNLTKAYTEVAAAHQQQLHQLEFARKILEKKELNEDIQVTPNAQQGSESPARGGRKSEALRSQLEEERKRVAQVQRELEEQRSQLLQLKTQRPVEKLEEKEVVEFYRDPQLESNLSRVKSQVEDEGKKQAGLQADLEAVAQKVMQLESQRKATEPHLLTKEVTQIERDPGLDSQAAQLKSELQLLQEENTAVLAQLEALKAELLALEQKEVNVKETVVVKEVVKVEKDLEMLQAAQALRLKIQEDVAQRKGAEDAVAKLQARVVELEAAIRTVEPKVIVKEVKKVEQDPRLLQEASRLRSLLEVQRSENEVLAREELKELHSKHSAAEKQKPRVDLQERVQETFRVDPETEREIAQLRAELQETGRKRNGTEQEVERLLSELVVLRAQKPTVEYKEVTQELVRHEKNPELLREIDRLKAQLNELVNGSGRAQEQLIRLQGERDEWRRERSKVETKTVNKEVVRREKDPVLEQEAQRLRQEVREATQKRRAAEDAVHQLQNKYLLLERRRPEERVVVQEVVVTQKDPKLHEEHSRLSQSLDEEAGRRRQLEREVQQLQAAVQEDEGRLSFREDRSKKLAVERELRQLTLKLQELEKRPPAVQEKIIMEEVVQLEKDPDLEKSTAALRQDLAQEKTQATEVHRECKNLQVQIDVLQKTKLQEKTIYKEVIRVEKDPVLEGERARVWEALNRERAARESREEEVRRLRERVERAEALGRTWAREEAELQKTRDRASQECRQLQQELRELERQKQQRVLHLQEESKLLSQKTESERQRAAQRGQELSQLESAILREKDRIYEKERTLRDLHTQVSREELNQETQTRETNISTKISILEPETGKDMSPYEAYKRGVIDRSQYLQLQDLECDWEEVTTSGPHGEESVLLDRKSGKQYSIEAALRSRRISKEEYHLYKDGQLPISEFALLVAGETKPCPSLSIGAIISKSPLASPASQSTSLFSPSFSLGLSEDSFPIAGVYDTTTDNKCTIKTAVAKNMLDPITGQKLLEAQAATGGIVDLLSRERYSVHKAVERGLIESGSTQRLLNAQKAFTGIEDPVTKKRLSVGEAVQKGWMPQESVLPHLRVQHLTGGLIDPKKTGRIPVAQAVLSGMISEELAQLLQDEASYEKDLTDPISKERLSYREAMGRCRKDPLSGLLLLPASLEGYRCYRSASPTVPRSLR

SEQ ID NO: 95 - DNA, 6087 bp, Canis familiaris
  CDS (1)..(6087)
atgttcaagggtctgagcaaaggctcccaggggaaagggtcccctaagggctcctcagccaagggctcccccagcaagcacagccgggctgccacccaggagttggccctgctcatctcccgcatgcaggccaatgctgaccaggtagagagggacattctggagacccagaagagactgcagcaggaccggctgcacagcgagcagagccaggccctgcagcacaggcaggaagtggggcgcagcctgaaggaggctgaggtgctgctgaaagacctcttcctggatgtggataaggcgcggcggctcaagcacccacaggccgaggagattgagaaggacatcaagcagctgcacgagcgagtgacccaagagtgtgccgagtaccgcgccctgtatgagaagatagtgctgccacccgatgtggggcccagggtcgactgggcgcgtgtgctagagcagaaacagaagcaggtctgcgagggccagtacgggccgggcatggcagagctggagcagcagattgcggagcacaacatcctgcagaaggagattgaggcctacgggcagcagctccggaacctcatcgggccggacgcagctaccatcaggagccaataccgggacctcctgaaggcggcctcgtggcgcggccagagcctgggcagcctgtacacgcaccttcagggctgcacgcgccagctgagtgccctggcccagcagcagcagggcatcctgcagcaggactggagcgacctcctggcggacccccagggcgtgcggcgggagtacgagcacttcaagcagcaggagctgctgagccaggagcagagcgtgaaccagctggaggatgacggggagcgcatggtggagctggggcacccggctgtggggcccatccagacccaccaggaggccctgaagatggaatggcagaactttctaaacctctgcatctgccaggagagccagctgcagcacgtggaggcctaccaccggttccaggaagaggccgactccgtgagccaaaccctggcgaagctgaactccagcctggacacccagtacagcccagcccctggggcgccccctggcgccctcacggagctgctgcagcagctggaggcagagaagaagcatctggctgtcactgagaagaccattagggacctgcagcggcagagccagcaggtggcccctctgcagcagcgcagaaacccaccccagcagcccctgcacgtggacagcatctgtgactgggactcaggagaagtgcagctgctgcggggcgaacggtatttgctgatggacaacactgaccagcacacctgggtcgttcagggtccagatggggagaccaaacgtgccccagccgcctgcttctgcatcccagctccggaccctgacgctgtggccagggcctccaagctggcgtcggagctgcaggccctgaagcagaaattggccgcagtccagagcgagctgacagcctgtgctgagcagcccttacagaccagccagcaggctcccactggctcagccccagaagacccacaggcccagaagctcctgacacagatgacccagctggatggagacctgaagcagatagagaggcaagtactggcctgggcccggaccccgctgagccgcacgacacccctggaagacctggagggccgcatccagagccataaggaaacagcccagcggctgcagggcctgggagcagagaaagaaacagcccagcaggagtgtgaggcgttgctgtccgcccggcctgggggccccgctgccctgcagctgcccgtggccctcaacagtgtcaagaacaagtacagtgacgtgcagattctttgcaacctctacggggagaaagccagagctgccctgggtctggagcgccggatccaggacgcggacagggtcatccgaggcttcgagtccactgtggcgcaggagggccccatccccgccagccccggggcactgcaggagagggtcaatgagctacagcgcctgcggagggagctgctggaaaagcaggcctgtgtgctggggctgcaccgcgagctgaaggccaccgagcatgcatgcagcgccctgcagaacaacttccaggagttctgccaagacctgcctcgccagcagcgccaggcccgggcccttaccgaccgctaccacgctgtgggggaccagctggacctgcgggagaagatgttgcaggatgttggcctcacctaccagcagttcaagaattacttggacaatctgagcttctggctggaaaacctgccccgcaatgaagtgcggcccagcgatgggcccagccagctcgcctacaagctgcaggcacagaagaggctgcagcaggagatccagggccgagagcaggacagggccatggcatcccgcctctcccaggacctgcaggcagctctccaggactatgagttgcaggcagacacctaccgctgctccctagagaccaccacccaggcagggtcagcccccaagagaccccgagtggctcccctgcaggagagcatccaggagcaggagaagagcctgacaaaggcctatactgaggttgcggctgcacaccagcagcagctgcatcagctggagtttgccagaaggatgctggagaagaaggagctcagtgaggatgtccaggtgacccatgatgcacagcaggggtctgagagcccagcccaagcaaggaaggagtcagaggccctaaagtcccagctggaggaggagaggaagcgggtggcccaggtgcagcaacagctggaggaacagcggaaccagctgctgcagctgagaacccagcgccccttggagaggctagaagagaaggaagtggtagagttttaccgggacccccaactggagagcagcctgtccagggtaaagtcccaggtagaggaggaaggcaagaagcgggccggcctgcaggcggacctggaggcagcagcccagaaggtcgtccagctggagagcaagaagagggccatgcaacctcacctgctgaccaaggaggtaacccagatcgagagggaccctgacctggagagccaggcagcccagctcagcagcgagatcctgcagctgcggggggagaatgccaccgtctcggcccggctcgaggtgctaaagaaggagctgctggccctggagcagaaggagccgaatgtgaaggagagggtcgtggtgaaagaagtggtcaaggtggagaaggacctggaaatgcttaaggcagcccaggccctccggctgcagctggaggaggactctgcgcggaggaagggggcggaagaggctgtggccaagctgcgggcacgcattgaagagctagagcgggcgatcggtgccgtggagcccaaggtgatcgtgaaggaggtgaagaaggtggagcaggacctgggcctcctggaagaggcgtccaggctgaggaacctcctagaggaggccaggagcaggaacgccacgctggcgcgcgagctggaggacgtgcggggcaagtacagcgtggtggagaagcagaagcccaaagtggagctccaggagcgcatccacgagaccttccaggtggctccggagacgcagcaggagatcgcgcggctccgggcccagctgcaggacaccgccagcaggaggagcggcgtagagaaggagctggaggggctgctgcccgagctggccgccctccgtgcccagaagcccgcggtggagtacaagcaggtgacgcaggaggtggtgaagcacgagaggagtcccgaggtgctgcgggagatcgaccgcctgaaggcccagctgaatgagctggtaaacggcagcgggcgggcccaggagcagctcatccggctgcagggggagcgcgacgagtggaggcgggagcggtccaaggtggagaccaagacagtgaacaaggaggtggtgcgccacgagaaggaccctgtcctggagaaggaggccgagcggctgcgccaggaggttcgagaagccacccagaggaggcgggccaccgaggacgtggtctccgagctgcagaaccggtacctgctgctggagaggaggcggcccgaggagagggtggtggtacaggaggtggtggtcacccagaaggacccgaagctccgagaggaccacggccggctgagccagagcctggacgaggaggcgggccggcggcggcagctggagcgggaggtgcagcagctccgggctggtgtgcaggagaaggagagcctgctcagcttccaggaggaccggaccaagaagctggccgtggagagggagctgcggcagctgaccctgcggatccaggagctcgagcagcggcctcctgcggtgcaagagaagatcatcatggaggaggtggtcaagctggagaaagacccggatctggagaagtccacagaagccctgcggcaggacctggagcaggagaagacccgggtgacagagctgcatcgggagtgcaagaacctgcaggtgcagatcgacgtcctccagaccacgaaatcgcaggagaagaccatctacaaggaagtgatccgggtagagaaggaccgggtgctggagggcgagcggtcccgggcgtgggaggcgctcaaccgggagcgcggggcccggcagagccgggaggaggaggtgcggcacctccggcagcggctggacggggccgaggcgctgaggaggacccgggcccgcgaggaggctgagctccagaggtcccgggcccaggcggaccaggagcaccggcagctgcggcaggagctgcgggagctggagaggcggaagcagcagagggcgctgcacctgcaggaggaggcgaagctgctcagccagaggacggacggcgagcggcagaaggcggcccagcggggccaggagctctcgcagctcgaggcggccatcctccgcgagaaggaccagatccacgagaaggagaggacgctgcgcgacctccgcgccagggtgagcagggaggagctcaaccaggagacccagacgcgagagaccaacctctccaccaagatctccatcttggaacccgagacggggaaggacctgtccccgtatgaggcctacaagcagggcatcatcgatcggggccagtacctccagctccaggagctcgagtgtgactgggaggaggtcaccacctcgggcccctgcggcgaggagtccgtgctgctggaccgcaagagcgggaagcagtactccatcgaggcggccctgtactgccggcgcatctccaaggaggagtaccacctctacaaggacggccagctgcccatctccgagttcgcgctgctcgtggcaggggagaccaagccctgctcctcgctctccattggctccatcatctccaagtccccactcgcctccccagccacccagggctccggtttcttctccagcggctcccttgggctcagcgatgacagcttccccatcgctggcatctatgacacgaccacggacaacaaatgcagcatcaagacggccatggccaagaacatgctggaccccatcacggggcagaagctgctggaggcccaggcggccacagggggcatcgtggacctcctcagccgggagcgctactccgtgcacaaggccatggaaagggggctgatcgagaacacctcgacacagaggctgctcaacgcccagaaggccttcaccggcatcgaggatcccgtcaccaggaagaggctgtcggtgggcgaggccgtgcagaagggctggatgccgcgggagagcgtgctcccacacctgcaggtccagcacctgaccgggggactcatcgaccccaagaggaccggccgcatccctgtccctcaggccgtgctctccggaatgatcagtgaagagctggcccagctcctgcaggatgagtccggctatgagaaggatttgacagaccccatctccagggagcggatgagctacaaggaggccatggggcgctgccggagagaccccctgagcggcctgctgctgctcccagccacgctggaggggtaccactgctaccgctccgcctcccccagggcgctgcgctccctgcgc

SEQ ID NO: 96 - protein, 2029 aa, Canis familiaris
MFKGLSKGSQGKGSPKGSSAKGSPSKHSRAATQELALLISRMQANADQVERDILETQKRLQQDRLHSEQSQALQHRQEVGRSLKEAEVLLKDLFLDVDKARRLKHPQAEEIEKDIKQLHERVTQECAEYRALYEKIVLPPDVGPRVDWARVLEQKQKQVCEGQYGPGMAELEQQIAEHNILQKEIEAYGQQLRNLIGPDAATIRSQYRDLLKAASWRGQSLGSLYTHLQGCTRQLSALAQQQQGILQQDWSDLLADPQGVRREYEHFKQQELLSQEQSVNQLEDDGERMVELGHPAVGPIQTHQEALKMEWQNFLNLCICQESQLQHVEAYHRFQEEADSVSQTLAKLNSSLDTQYSPAPGAPPGALTELLQQLEAEKKHLAVTEKTIRDLQRQSQQVAPLQQRRNPPQQPLHVDSICDWDSGEVQLLRGERYLLMDNTDQHTWVVQGPDGETKRAPAACFCIPAPDPDAVARASKLASELQALKQKLAAVQSELTACAEQPLQTSQQAPTGSAPEDPQAQKLLTQMTQLDGDLKQIERQVLAWARTPLSRTTPLEDLEGRIQSHKETAQRLQGLGAEKETAQQECEALLSARPGGPAALQLPVALNSVKNKYSDVQILCNLYGEKARAALGLERRIQDADRVIRGFESTVAQEGPIPASPGALQERVNELQRLRRELLEKQACVLGLHRELKATEHACSALQNNFQEFCQDLPRQQRQARALTDRYHAVGDQLDLREKMLQDVGLTYQQFKNYLDNLSFWLENLPRNEVRPSDGPSQLAYKLQAQKRLQQEIQGREQDRAMASRLSQDLQAALQDYELQADTYRCSLETTTQAGSAPKRPRVAPLQESIQEQEKSLTKAYTEVAAAHQQQLHQLEFARRMLEKKELSEDVQVTHDAQQGSESPAQARKESEALKSQLEEERKRVAQVQQQLEEQRNQLLQLRTQRPLERLEEKEVVEFYRDPQLESSLSRVKSQVEEEGKKRAGLQADLEAAAQKVVQLESKKRAMQPHLLTKEVTQIERDPDLESQAAQLSSEILQLRGENATVSARLEVLKKELLALEQKEPNVKERVVVKEVVKVEKDLEMLKAAQALRLQLEEDSARRKGAEEAVAKLRARIEELERAIGAVEPKVIVKEVKKVEQDLGLLEEASRLRNLLEEARSRNATLARELEDVRGKYSVVEKQKPKVELQERIHETFQVAPETQQEIARLRAQLQDTASRRSGVEKELEGLLPELAALRAQKPAVEYKQVTQEVVKHERSPEVLREIDRLKAQLNELVNGSGRAQEQLIRLQGERDEWRRERSKVETKTVNKEVVRHEKDPVLEKEAERLRQEVREATQRRRATEDVVSELQNRYLLLERRRPEERVVVQEVVVTQKDPKLREDHGRLSQSLDEEAGRRRQLEREVQQLRAGVQEKESLLSFQEDRTKKLAVERELRQLTLRIQELEQRPPAVQEKIIMEEVVKLEKDPDLEKSTEALRQDLEQEKTRVTELHRECKNLQVQIDVLQTTKSQEKTIYKEVIRVEKDRVLEGERSRAWEALNRERGARQSREEEVRHLRQRLDGAEALRRTRAREEAELQRSRAQADQEHRQLRQELRELERRKQQRALHLQEEAKLLSQRTDGERQKAAQRGQELSQLEAAILREKDQIHEKERTLRDLRARVSREELNQETQTRETNLSTKISILEPETGKDLSPYEAYKQGIIDRGQYLQLQELECDWEEVTTSGPCGEESVLLDRKSGKQYSIEAALYCRRISKEEYHLYKDGQLPISEFALLVAGETKPCSSLSIGSIISKSPLASPATQGSGFFSSGSLGLSDDSFPIAGIYDTTTDNKCSIKTAMAKNMLDPITGQKLLEAQAATGGIVDLLSRERYSVHKAMERGLIENTSTQRLLNAQKAFTGIEDPVTRKRLSVGEAVQKGWMPRESVLPHLQVQHLTGGLIDPKRTGRIPVPQAVLSGMISEELAQLLQDESGYEKDLTDPISRERMSYKEAMGRCRRDPLSGLLLLPATLEGYHCYRSASPRALRSLR

SEQ ID NO: 97 - DNA, 1944 bp, Danio rerio
  CDS (1)..(1944)
atggtgtttgatcttcagaacaaatatattcagctggagagacaaaaacctgaggaaaagcttgtagtacaagaggtagtgcgtctacaaaaggatccaaggcagatccttgatcatgacaggttaggaaggagtctagatgaagaagtgaagaataggagaaaactagaactagaggtacagcagctgagagcactcatagaagacaaggaaatagcaatcaggagcagtgatgaaaagcaaaaaaagattcaggtggaaactgagctgagacaaattaaatccagaattcatgagctagaaactgccccacctcctattgaagagaacatagtcatagaggaagttctaaaagttgagagggatccaaaacttgataaactgacaaatggtcttcgcacagatatggataaagaaagcagcgacattatgcgtctagaaagagatatcaggaaattggcacttgatattgaaatcttgcagcgagagaagtcagttgagaagaccatctataaagaggttgttcgtgtagagaaagatcaagcacttgaagcagaacgatcccaccttagagaccagttccttcaggagaaaaatgtcagacgagaccttgaggataaactccatcgtctacaagagaaactacagcaacaagcaagcaaaaaaacggcaatgtcgctggaggagaccaacctagttcatgatcgggacaagctgcaaagagaaaaagaaaaccttcagagagaactgagatcattggaatctgaaagacaaaacatcaccatctccttccaacagcattctaggctgatgagtgaaagaaaccaaatgaacaggcaaagaagcattaaaatggaatcagatggtcagaggctggaaagggatatccttgatgaaaaagacaaaattcacaaacgagataacataattagggagctgaagaacagtttacagaaggaggactcctctgagatgcgcacaaaagaagtcaatgtttccacaaagataagcatcttggaccccaacactggaaaagatatgtcaccatatgatgcctataggcaaggcttcctcgatcgcaacaaatacttgcagttacaagaaatggagtgtgactgggaggaaatcactacaatggcacctgatgatgagatattggttttgcaagatcgcaagagtgggaaacagtactccatcaaaactgcactaaaagaaggcaaggtgaccaaataccaactacaacagtataaggatggcaaaatgtctatttcagagtttgctcttcttgtagctggggaaaaaaaatcatcgtcatacactccacacttcaacagccaattgaatcaacagcttaaagaagagtttcctatatgtggtgtatatgatgtacacacagattcatgtgtaaatgtgcgcagtgccatgagtcgaaagttgattgacaccaacactgcccaaaagcttcttgaagcacaagctgccactggaggtattgtggacatcagcaatggaataaaatattcggtacacaaagcagctgatcgaggtctgattgagtctagtcagctacagaggttactaaatgctcaaaaggccttcaccggagttgaggatcctatgaccaaagaacgtctgtcggtcggagaggctgtacaaaaaggctggatgcccaaagaaaatgccatgagatacatggaggcacaatttctgacaggcgggttggtcaaccccaacaaagcaggaagagttaacattgtggatgcagtcagctctaagatgattgacagtacaatgatgagagagcttcaggaagagatcaattatgcaaaagagctgactgatccaatcacaaaggaaaagatcaactacaaacaggctttggctcgttgtaagatagacccactctcaggccttccgatgtttaatgcttcctcaaaaaatgtc

SEQ ID NO: 98 - protein, 648 aa, Danio rerio
MVFDLQNKYIQLERQKPEEKLVVQEVVRLQKDPRQILDHDRLGRSLDEEVKNRRKLELEVQQLRALIEDKEIAIRSSDEKQKKIQVETELRQIKSRIHELETAPPPIEENIVIEEVLKVERDPKLDKLTNGLRTDMDKESSDIMRLERDIRKLALDIEILQREKSVEKTIYKEVVRVEKDQALEAERSHLRDQFLQEKNVRRDLEDKLHRLQEKLQQQASKKTAMSLEETNLVHDRDKLQREKENLQRELRSLESERQNITISFQQHSRLMSERNQMNRQRSIKMESDGQRLERDILDEKDKIHKRDNIIRELKNSLQKEDSSEMRTKEVNVSTKISILDPNTGKDMSPYDAYRQGFLDRNKYLQLQEMECDWEEITTMAPDDEILVLQDRKSGKQYSIKTALKEGKVTKYQLQQYKDGKMSISEFALLVAGEKKSSSYTPHFNSQLNQQLKEEFPICGVYDVHTDSCVNVRSAMSRKLIDTNTAQKLLEAQAATGGIVDISNGIKYSVHKAADRGLIESSQLQRLLNAQKAFTGVEDPMTKERLSVGEAVQKGWMPKENAMRYMEAQFLTGGLVNPNKAGRVNIVDAVSSKMIDSTMMRELQEEINYAKELTDPITKEKINYKQALARCKIDPLSGLPMFNASSKNV

SEQ ID NO: 99 - DNA, 6213 bp, Rattus norvegicus
  CDS (1)..(6213)
atgttcaaggggctgagcaaaggctctccagccaaggggtcccccaagggctccccagctaaggggtcccctaagggctcccccaacaagcacagtcgggctgcaacccaggaactggctctgctcatctctcgcatgcaagccaatgctgaccaggtagagagggacattttggagactcagaagaagctgcagcaagtcaacaagaacattggggaacttgtggtgagcctttgcgccctgaccacatgggtcatgcctcaccaggatcggcagaatggtgcacagaatcaggcactacagcaccagcaggagacgggccgcaacctgaaggaagcggaggtactcctcaaagatctcttcctggatgtagacaaggctcggcgcctcaagcacccacaggctgaggagattgagaaagacatcaagcagctgcacgaacgagtgacccaggagtgtgcggagtatcgagctctgtatgagaagatagtgctgccgccggatgtggggcccagggtcgactggacacgggtgctggagcagaaacagaagctgatctgtgagggccactatgggcctgggatggcagaactggaacagcaggtggccgagcacaacatcctgcagagggaaatcgaggcttacgggcagcagctgcggacactggtgggaccggatgcaaacgccatcaggaaccaataccgtgacctactgaaggcagcctcgtggcgccggcagagtctgggcagcttgtacacacacctgcagggctgcacgaagcagctgggcgccctggcggatcaacaaggccgcatcctgcagcaggattggagtgacctcatgcctgaccccgctggtgtgaggcgagagtatgagcacttcaagcagcatgagctgctggcccaggaacagagtataaaccagttggaggatgacgcagagcgcatggtcgagctcgggcacccggccattgggcccatccaggcccaccaggaggccctcaaaatggagtggcagaatttcctaaacctgtgcatctgtcaggagagccagctgcagcatgtggaggactaccgaaggttccaggaagaggccgactcagccagccagaccctggcaaagctcagctccaacctggacaccaagtacagctttggcgctggggactcctctgtctccccaacagagctcctgctacagctggaggcagaggagaagcagctggccatagcagagaggactattggagagctgcagcgacgaagccaggaggtggccccgctgccacagcgcaggaacccacccaagcagcccctgcacgtggacagcatctgtgactgggactccggagaagtgcagctgcttcggggagagcggtacacactcaaggataatgctgacccctacacctgggtggttcagggccctggaggagagaccaagagtgccccagctgcctgcctctgcatcccagcaccagacccagaagctgtagccaaagcctccaggttggcctccgagctgcagaccctgaagcagaagctgtctacagagaagagtcgtctcaagaatgcttcagcagagcacttacagcagggccagcagggtaccagaggatgtccagggagggcactggtgggtgggccgtgccgggtagaagctccggcaggctcagccccggctgacccacaggctcagaagctcctgtcacagatgacccagctggatggggatctgggacaggtagagaggcaggtgctgagctgggctcggagcccgttgaacgactcttctccactgaaggacctagagggccgaatccagagctgtgagggcacggcacagcatcttcagaacctgggagctgagaaggaggcagcccagcaggagtgtgaggcgtttctgtcgactaagcctacaggctcagcggccctgcagctgcctgtggtcctcaataatgtcaagaacaagtatagtgatgtgcatagcctgtgctacctctatggggagaaagccaaggctgctctgggcctggagaagcagatccaggaggcagatgggatcatccaaggctttgaagctaccctggcacaggagggccccatccctgaaggctctggggcactgcaggagagggtcagcgagctgcagcgccagcggaaagagctcctccagcagcaggcctgcgtgttggggctgcaccggcagctgaaggccgcggagcacgcgtgcggtgcgctgcagaacaatttccaagagttctgccaggacctgccgcgccagcagcgccaagtgcgagccctcaccgaccgttaccacagcgtgggggaccagctggatttgagggagaagatactacaggatgccagcctcacccaccagcagctcaagaacagcagggacaacctgagctcctggctggagcagctgccccaccaccgtgtgcagcccagcgacgggccaagccagatcgcctacaagctgcaagcacagaagaggctgatacaggaaatcctgggtcgtgagcaggaccaggccacagtggcccgcctcacccgggacctgcaggaggctctccaggagtatgagctgcgagcagacacctaccgctgctccctggagcccaccttggcggtgtccgcccctaagagactcagagtgatttccttaaaggagaacatccaggctcaggagaagaaccttactaaagcttacactgaggtcgccgcagcggaacagcagcagctgcaccagctggagtttgctaagaagatgctggagaagaaggagctcaatgaggacttccaagccatccacagtgcaagacaaggatctggcagtccagcacatacaaagacagagtcagaggtcctgaagacccagctcgaggaagagaggaaacgcgtggctgaggtgcagcgtgaactggaggagcggaggcagcagctgctgcagctgaggacccagcagcctgtggctcggctggaggagaaggaagtggtagagttctaccgggacccccagctaaagagtaacgtgcttcaggcatcgtcccggctggaggaagaaggcaagaggcgagcccgcctacaagccgagctggaggtggtggcccaaaaggttgtccacttggagggcaagaggaaggccatgcagcctcacctgctgaccaaagaggtcacccaaattgagagggaccccggcctggacagccaggttacccagctccacaatgagatgcaggggctgcgtggggagaacgccgtcctcgcagccaggctggaggggctgaaggatgagttgctgaccctggagcagaaggagataaatgtgaaggagaaggtggtggtgaaggaggtagttaaggtggagaaggatctggaaatggtgaaggcggcccagacgctaaggctgcagatcgaggaagatgctgcacggaggaagggggcgaaggaagcagtagccaagacacaggctcgcatcaaagacctggagcaggcgatcagctccgtggagcccaaggtcattgtgaaggaggtgaagaaagtggagcaggaccctgggcttctcaaggaagcctccaggctgagaagcctcctggaggaggagaagaacaagaacgtcatgttggccagggaactgcaggaactgcaggacaagtacagggcggtagagaagcagaagcctaaggtgcagctgcaggagcgcgtcagcgagatcttccaggtgcacccggagacagagcaggagatcctgaggctccgggcccagctgcaggagacaggcagcaagaagagctgtgtggagcgggaggtggagaagctgctgcctgagctggaggtcctgcgggctcagaagcccgtggtggaatataaggaggtgacgcaggaggtggtgaggcacgagaagaacccagaggtgctccgggagatcgaccgcctcaaggctcagctcaatgaactggtcaacacccacgggcgctgtcaagagcagctcatccggctccagggcgaacgcgatgagtggaagcgtgagcggtccaaggtggagaccaagatggtgaacaaagaggtggtgaggcatgagaaggatccagtgctggagaaagaggccgagaggctccggcaggaggtgcgggaggccgtccagaagaggcgagccgccgaggatgctgtctacgagctgcagaacaagtatctgctgctggagaggagacgccccgaggagcagatcgtagtgcaggaggtggtggtcacccagaaggacccgaagctgcacgaggagcacagccggctgagccggagcttggatgaggaggtggggaggcggcggcagctggagctggaggtgcggcagctgagcgccagcgtggaggaggaggaggccatgctcagcttcgaggaggaccgcagcaagaagctggctgcggagagggagctgcggcaactgaccctgaagatccaggagctggagaagcggcctcctgccctgcaggaaaagatcatcatggaggaggtagtcaagttagaaaaggatccggatctggagaggtccacagaagctctgaggcgagagctggatcaggagaagaaccgggtgatcgagctacaccgggagtgcaagggcctgcaggttgaggtcgacctccttcagaaaacgaaatcacaggaaaagaccatatataaggaagtgatcagggtggagaaggacccagtcctggagagcgagagggcccgtgtgtgggaaacccttaaccgggagcgagcagcacgccagagtcgggaggaggatgtccggagcttgaaagagcggatcgaccgagccgaggctctgaggaggtcctggtcactccagaaggcccgggaccaggcaagccaggactgtgggcggctgcagagagagctccgagagctggagcagcagaagctacagaaagcccagcagctacaagaggaggggcggctgcttagccagaagacggagagcgagcgccagaaggccgctcagcggagccaggccctctcacagctcgaggctgccattctccatgaaaaggacaagatatacgagaaggaaaggaccctcagggacctgcacaccaaagtgagccgggaggagctcaaccaggaaacccagacacgggagaccaacctttccaccaagatctgcatcttggaaccagagaccgggaatgacatgtctccctacgaggcctacaagaggggtatcatcgacagaggccagtacctccagctgcaggagctggagtgtgactgggaagaagttaccacctccagtccctgtggggaggagtctgtgctcttggaccgcaagagcgggaagcaatactccattgaggccgccctccgctgccgccgcatctccaaagaagaatatcacaggtacaaagatggccgcctccccatctccgagtttgccctgcttgtggcaggggagaccaagcccagttcctcactctccattgggtccatcatctccaagtccccagtctgctccccaggaccccagagtaccggcttcttctccccaggcctttctttggggctcactgaggatagcttccccatcgctggggtttatgatacaaccacagataacaagtgtagcatcaaggcagctgtggccaagaacatgctggatcccatcactgggcagaagctgttggaggcccaggcagccacaggaggcatcgtagatcttctcagccgagaacgatactccgtacacaaggcagtggagcagggactcattgagaacacctccacccaacgtctgctcaacgctcagaaggccttcaccggcatcgaggacccagtcaccaggaagaggctgtcagtgggtgaggccatccagaagggctggatgccccaggaaagcgtgcttccccacctactggtgcagcaccttactgggggcctcatcgatcccaagaggacaggacgcatccccgtccctcaggctgtgctctgcgggatgatcagcgaagacctaggtcagctcctgcaagacgaatccagctacgagaaggatttgacagaccccatcaccaaggagaggctgagctacaaggaggccatggggcgctgccacaaagatcctctaagtggcctgctacttctcccagccatgctggaaggctaccgctgctaccgagtggcctcccccaccctgcctcgctcctgtgtgcgttga

SEQ ID NO: 100 - protein, 2070 aa, Rattus norvegicus
MFKGLSKGSPAKGSPKGSPAKGSPKGSPNKHSRAATQELALLISRMQANADQVERDILETQKKLQQVNKNIGELVVSLCALTTWVMPHQDRQNGAQNQALQHQQETGRNLKEAEVLLKDLFLDVDKARRLKHPQAEEIEKDIKQLHERVTQECAEYRALYEKIVLPPDVGPRVDWTRVLEQKQKLICEGHYGPGMAELEQQVAEHNILQREIEAYGQQLRTLVGPDANAIRNQYRDLLKAASWRRQSLGSLYTHLQGCTKQLGALADQQGRILQQDWSDLMPDPAGVRREYEHFKQHELLAQEQSINQLEDDAERMVELGHPAIGPIQAHQEALKMEWQNFLNLCICQESQLQHVEDYRRFQEEADSASQTLAKLSSNLDTKYSFGAGDSSVSPTELLLQLEAEEKQLAIAERTIGELQRRSQEVAPLPQRRNPPKQPLHVDSICDWDSGEVQLLRGERYTLKDNADPYTWVVQGPGGETKSAPAACLCIPAPDPEAVAKASRLASELQTLKQKLSTEKSRLKNASAEHLQQGQQGTRGCPGRALVGGPCRVEAPAGSAPADPQAQKLLSQMTQLDGDLGQVERQVLSWARSPLNDSSPLKDLEGRIQSCEGTAQHLQNLGAEKEAAQQECEAFLSTKPTGSAALQLPVVLNNVKNKYSDVHSLCYLYGEKAKAALGLEKQIQEADGIIQGFEATLAQEGPIPEGSGALQERVSELQRQRKELLQQQACVLGLHRQLKAAEHACGALQNNFQEFCQDLPRQQRQVRALTDRYHSVGDQLDLREKILQDASLTHQQLKNSRDNLSSWLEQLPHHRVQPSDGPSQIAYKLQAQKRLIQEILGREQDQATVARLTRDLQEALQEYELRADTYRCSLEPTLAVSAPKRLRVISLKENIQAQEKNLTKAYTEVAAAEQQQLHQLEFAKKMLEKKELNEDFQAIHSARQGSGSPAHTKTESEVLKTQLEEERKRVAEVQRELEERRQQLLQLRTQQPVARLEEKEVVEFYRDPQLKSNVLQASSRLEEEGKRRARLQAELEVVAQKVVHLEGKRKAMQPHLLTKEVTQIERDPGLDSQVTQLHNEMQGLRGENAVLAARLEGLKDELLTLEQKEINVKEKVVVKEVVKVEKDLEMVKAAQTLRLQIEEDAARRKGAKEAVAKTQARIKDLEQAISSVEPKVIVKEVKKVEQDPGLLKEASRLRSLLEEEKNKNVMLARELQELQDKYRAVEKQKPKVQLQERVSEIFQVHPETEQEILRLRAQLQETGSKKSCVEREVEKLLPELEVLRAQKPVVEYKEVTQEVVRHEKNPEVLREIDRLKAQLNELVNTHGRCQEQLIRLQGERDEWKRERSKVETKMVNKEVVRHEKDPVLEKEAERLRQEVREAVQKRRAAEDAVYELQNKYLLLERRRPEEQIVVQEVVVTQKDPKLHEEHSRLSRSLDEEVGRRRQLELEVRQLSASVEEEEAMLSFEEDRSKKLAAERELRQLTLKIQELEKRPPALQEKIIMEEVVKLEKDPDLERSTEALRRELDQEKNRVIELHRECKGLQVEVDLLQKTKSQEKTIYKEVIRVEKDPVLESERARVWETLNRERAARQSREEDVRSLKERIDRAEALRRSWSLQKARDQASQDCGRLQRELRELEQQKLQKAQQLQEEGRLLSQKTESERQKAAQRSQALSQLEAAILHEKDKIYEKERTLRDLHTKVSREELNQETQTRETNLSTKICILEPETGNDMSPYEAYKRGIIDRGQYLQLQELECDWEEVTTSSPCGEESVLLDRKSGKQYSIEAALRCRRISKEEYHRYKDGRLPISEFALLVAGETKPSSSLSIGSIISKSPVCSPGPQSTGFFSPGLSLGLTEDSFPIAGVYDTTTDNKCSIKAAVAKNMLDPITGQKLLEAQAATGGIVDLLSRERYSVHKAVEQGLIENTSTQRLLNAQKAFTGIEDPVTRKRLSVGEAIQKGWMPQESVLPHLLVQHLTGGLIDPKRTGRIPVPQAVLCGMISEDLGQLLQDESSYEKDLTDPITKERLSYKEAMGRCHKDPLSGLLLLPAMLEGYRCYRVASPTLPRSCVR

SEQ ID NO: 101 - DNA, 1686 bp, Pan troglodytes
  CDS (1)..(1686)
atgttcaaggggctgagcaaaggctcccaggggaaggggtcccccaagggctcccccgccaaaggggtcccccaaaggctcccccagcaagcacagccggaccggctgaacagtgagcagagccaggccctgcagcaccagcaggagacgggccgcagcctgaaggaggccgaggtgctgctcaaggaccttttcctggacgtggacaaggcccggcggctcaagcacccgcaggctgaggagattgagaaggacatcaagcagctgcacgagcgggtgacccaggagtgtgcggagtaccgtgccctgtacgagaagatggtgctgccccccgacgtgggacccagggtcgactgggcacgcgtgctggagcagaaacaggcccaccaggaggccctgaagatggagtggcagaacttcctgaacctgtgtatctgccaggagacccagctgcagcacgtggaggactaccgccggttccaggaagaggccgactcagtcagccagaccctggcgaagctcaactccaacttggatgccaagtacagccctgcacctgggggcccccctggcgcccccacagagctgctgcaacagctggaggcagaggaaaaacggctggccatcaccgagagggccactggggacctgcagcggcgaagccaggatgtgccccctctgccacagcgaagaaacccacctcagcagcccctgcacgtggacagcatctgcgactgggactcaggagaagtgcagctgctgcggggtgagcggtataagctggtagataacactgacccgcacacctgggtcgtgcagggccctggtggggagaccaagcgtgctcccgccgcctgcttctgcatcccagcaccagaccctgatgctgtggccagggcctcccggaaggttccagtagggcccaatgtcaacaccccaggaggtattctgggcacagcccagcgcctgcagagcctgggaacggagaaggagacagcccagaaggagtgcgaggcgtttctgtccacgcggcccgtgggccccgctgccctgcagctgcccgtagccctcaacagcgtgaagaacaagttcagtgacgtgcaggttctgtgcagcctctacggggagaaagccaaggctgccctgggtctggagcggcagatccaggatgcggacagggtcatccgaggcttcgaggccaccctggtgcaggaggcccccatccctgctgaaccgggggctctgcaggagagggtcagcgagctgcagcgccagcggagggagctgctggaacagcagacctgcgtgctgcggctacaccgcgcgctgaaggcctcggagcacgcatgcgctgcgctgcagaacaacttccaggagttctgccaagacctgcctcgccagcagcgccaggtgcgagccctcaccgaccgctaccacgccgtaggggaccagctggacctgcgggagaaggtggtgcaggatgccgccctcacctaccagcagttcaagaactgcaaggataacctgagctcctggctggagcacctgccccgcagccatgtgcggcccagcgacggccccagccagatcgcctacaagttgcaggcgcagaagacggggccagcccatctctgtctggcccgactggggcagtgggatttacaagctcaggccacagagccctga

SEQ ID NO: 102 - protein, 561 aa, Pan troglodytes
MFKGLSKGSQGKGSPKGSPAKGVPQRLPQQAQPDRLNSEQSQALQHQQETGRSLKEAEVLLKDLFLDVDKARRLKHPQAEEIEKDIKQLHERVTQECAEYRALYEKMVLPPDVGPRVDWARVLEQKQAHQEALKMEWQNFLNLCICQETQLQHVEDYRRFQEEADSVSQTLAKLNSNLDAKYSPAPGGPPGAPTELLQQLEAEEKRLAITERATGDLQRRSQDVPPLPQRRNPPQQPLHVDSICDWDSGEVQLLRGERYKLVDNTDPHTWVVQGPGGETKRAPAACFCIPAPDPDAVARASRKVPVGPNVNTPGGILGTAQRLQSLGTEKETAQKECEAFLSTRPVGPAALQLPVALNSVKNKFSDVQVLCSLYGEKAKAALGLERQIQDADRVIRGFEATLVQEAPIPAEPGALQERVSELQRQRRELLEQQTCVLRLHRALKASEHACAALQNNFQEFCQDLPRQQRQVRALTDRYHAVGDQLDLREKVVQDAALTYQQFKNCKDNLSSWLEHLPRSHVRPSDGPSQIAYKLQAQKTGPAHLCLARLGQWDLQAQATEP

SEQ ID NO: 103 - DNA, 6921 bp, Homo sapiens
  CDS (158)..(6286)
gaattctgactgtccactcaaaacttctattccgatcaaagctatctgtgactacagacaaattgagataaccatttacaaagacgatgaatgtgttttggcgaataactctcatcgtgctaaatggaaggtcattagtcctactgggaatgaggctatggtcccatctgtgtgcttcaccgttcctccaccaaacaaagaagcggtggaccttgccaacagaattgagcaacagtatcagaatgtcctgactctttggcatgagtctcacataaacatgaagagtgtagtatcctggcattatctcatcaatgaaattgatagaattcgagctagcaatgtggcttcaataaagacaatgctacctggtgaacatcagcaagttctaagtaatctacaatctcgttttgaagattttctggaagatagccaggaatcccaagtcttttcaggctcagatataacacaactggaaaaggaggttaatgtatgtaagcagtattatcaagaacttcttaaatctgcagaaagagaggagcaagaggaatcagtttataatctctacatctctgaagttcgaaacattagacttcggttagagaactgtgaagatcggctgattagacagattcgaactcccctggaaagagatgatttgcatgaaagtgtgttcagaatcacagaacaggagaaactaaagaaagagctggaacgacttaaagatgatttgggaacaatcacaaataagtgtgaggagtttttcagtcaagcagcagcctcttcatcagtccctaccctacgatcagagcttaatgtggtccttcagaacatgaaccaagtctattctatgtcttccacttacatagataagttgaaaactgttaacttggtgttaaaaaacactcaagctgcagaagccctcgtaaaactctatgaaactaaactgtgtgaagaagaagcagttatagctgacaagaataatattgagaatctaataagtactttaaagcaatggagatctgaagtagatgaaaagagacaggtattccatgccttagaggatgagttgcagaaagctaaagccatcagtgatgaaatgtttaaaacgtataaagaacgggaccttgattttgactggcacaaagaaaaagcagatcaattagttgaaaggtggcaaaatgttcatgtgcagattgacaacaggttacgggacttagagggcattggcaaatcactgaagtactacagagacacttaccatcctttagatgattggatccagcaggttgaaactactcagagaaagattcaggaaaatcagcctgaaaatagtaaaaccctagccacacagttgaatcaacagaagatgctggtgtccgaaatagaaatgaaacagagcaaaatggacgagtgtcaaaaatatgcagaacagtactcagctacagtgaaggactatgaattacaaacaatgacctaccgggccatggtagattcacaacaaaaatctccagtgaaacgccgaagaatgcagagttcagcagatctcattattcaagagttcatggacctaaggactcgatatactgccctggtcactctcatgacacaatatattaaatttgctggtgattcattgaagaggctggaagaggaggagattaaaaggtgtaaggagacttctgaacatggggcatattcagatctgcttcagcgtcagaaggcaacagtgcttgagaatagcaaacttacaggaaagataagtgagttggaaagaatggtagctgaactaaagaaacaaaagtcccgagtagaggaagaacttccgaaggtcagggaggctgcagaaaatgaattgagaaagcagcagagaaatgtagaagatatctctctgcagaagataagggctgaaagtgaagccaagcagtaccgcagggaacttgaaaccattgtgagagagaaggaagccgctgaaagagaactggagcgggtgaggcagctcaccatagaggccgaggctaaaagagctgccgtggaagagaacctcctgaattttcgcaatcagttggaggaaaacacctttaccagacgaacactggaagatcatcttaaaagaaaagatttaagtctcaatgatttggagcaacaaaaaaataaattaatggaagaattaagaagaaagagagacaatgaggaagaactcttgaagctgataaagcagatggaaaaagaccttgcatttcagaaacaggtagcagagaaacagttgaaagaaaagcagaaaattgaattggaagcaagaagaaaaataactgaaattcagtatacatgtagagaaaatgcattgccagtgtgtccgatcacacaggctacatcatgcagggcagtaacgggtctccagcaagaacatgacaagcagaaagcagaagaactcaaacagcaggtagatgaactaacagctgccaatagaaaggctgaacaagacatgagagagctgacatatgaacttaatgccctccagcttgaaaaaacgtcatctgaggaaaaggctcgtttgctaaaagataaactagatgaaacaaataatacactcagatgccttaagttggagctggaaaggaaggatcaggcggagaaagggtattctcaacaactcagagagcttggtaggcaattgaatcaaaccacaggtaaagctgaagaagccatgcaagaagctagtgatctcaagaaaataaagcgcaattatcagttagaattagaatctcttaatcatgaaaaagggaaactacaaagagaagtagacagaatcacaagggcacatgctgtagctgagaagaatattcagcatttaaattcacaaattcattcttttcgagatgagaaagaattagaaagactacaaatctgccagagaaaatcagatcatctaaaagaacaatttgagaaaagccatgagcagttgcttcaaaatatcaaagctgaaaaagaaaataatgataaaatccaaaggctcaatgaagaattggagaaaagtaatgagtgtgcagagatgctaaaacaaaaagtagaggagcttactaggcagaataatgaaaccaaattaatgatgcagagaattcaggcagaatcagagaatatagttttagagaaacaaactatccagcaaagatgtgaagcactgaaaattcaggcagatggttttaaagatcagctacgcagcacaaatgaacacttgcataaacagacaaaaacagagcaggattttcaaagaaaaattaaatgcctagaagaagacctggcgaaaagtcaaaatttggtaagtgaatttaagcaaaagtgtgaccaacagaacattatcatccagaataccaagaaagaagttagaaatctgaatgcggaactgaatgcttccaaagaagagaagcgacgcggggagcagaaagttcagctacaacaagctcaggtgcaagagttaaataacaggttgaaaaaagtacaagacgaattacacttaaagaccatagaggagcagatgacccacagaaagatggttctgtttcaggaagaatctggtaaattcaaacaatcagcagaggagtttcggaagaagatggaaaaattaatggagtccaaagtcatcactgaaaatgatatttcaggcattaggcttgactttgtgtctcttcaacaagaaaactctagagcccaagaaaatgctaagctttgtgaaacaaacattaaagaacttgaaagacagcttcaacagtatcgtgaacaaatgcagcaagggcagcacatggaagcaaatcattaccaaaaatgtcagaaacttgaggatgagctgatagcccagaagcgtgaggttgaaaacctgaagcaaaaaatggaccaacagatcaaagagcatgaacatcaattagttttgctccagtgtgaaattcaaaaaaagagcacagccaaagactgtaccttcaaaccagattttgagatgacagtgaaggagtgccagcactctggagagctgtcctctagaaacactggacaccttcacccaacacccagatcccctctgttgagatggactcaagaaccacagccattggaagagaagtggcagcatcgggttgttgaacagatacccaaagaagtccaattccagccaccaggggctccactcgagaaagagaaaagccagcagtgttactctgagtacttttctcagacaagcaccgagttacagataacttttgatgagacaaaccccattacaagactgtctgaaattgagaagataagagaccaagccctgaacaattctagaccacctgttaggtatcaagataacgcatgtgaaatggaactggtgaaggttttgacacccttagagatagctaagaacaagcagtatgatatgcatacagaagtcacaacattaaaacaagaaaagaacccagttcccagtgctgaagaatggatgcttgaagggtgcagagcatctggtggactcaagaaaggggatttccttaagaagggcttagaaccagagaccttccagaactttgatggtgatcatgcatgttcagtcagggatgatgaatttaaattccaagggcttaggcacactgtgactgccaggcagttggtggaagctaagcttctggacatgagaacaattgagcagctgcgactcggtcttaagactgttgaagaagttcagaaaactcttaacaagtttctgacgaaagccacctcaattgcagggctttacctagaatctacaaaagaaaagatttcatttgcctcagcggccgagagaatcataatagacaaaatggtggctttggcatttttagaagctcaggctgcaacaggttttataattgatcccatttcaggtcagacatattctgttgaagatgcagttcttaaaggagttgttgaccccgaattcagaattaggcttcttgaggcagagaaggcagctgtgggatattcttattcttctaagacattgtcagtgtttcaagctatggaaaatagaatgcttgacagacaaaaaggtaaacatatcttggaagcccagattgccagtgggggtgtcattgaccctgtgagaggcattcgtgttcctccagaaattgctctgcagcaggggttgttgaataatgccatcttacagtttttacatgagccatccagcaacacaagagttttccctaatcccaataacaagcaagctctgtattactcagaattactgcgaatgtgtgtatttgatgtagagtcccaatgctttctgtttccatttggggagaggaacatttccaatctcaatgtcaagaaaacacatagaatttctgtagtagatactaaaacaggatcagaattgaccgtgtatgaggctttccagagaaacctgattgagaaaagtatatatcttgaactttcagggcagcaatatcagtggaaggaagctatgttttttgaatcctatgggcattcttctcatatgctgactgatactaaaacaggattacacttcaatattaatgaggctatagagcagggaacaattgacaaagccttggtcaaaaagtatcaggaaggcctcatcacacttacagaacttgctgattctttgctgagccggttagtccccaagaaagatttgcacagtcctgttgcagggtattggctgactgctagtggggaaaggatctctgtactaaaagcctcccgtagaaatttggttgatcggattactgccctccgatgccttgaagcccaagtcagtacagggggcataattgatcctcttactggcaaaaagtaccgggtggccgaagctttgcatagaggcctggttgatgaggggtttgcccagcagctgcgacagtgtgaattagtaatcacagggattggccatcccatcactaacaaaatgatgtcagtggtggaagctgtgaatgcaaatattataaataaggaaatgggaatccgatgtttggaatttcagtacttgacaggagggttgatagagccacaggttcactctcggttatcaatagaagaggctctccaagtaggtattatagatgtcctcattgccacaaaactcaaagatcaaaagtcatatgtcagaaatataatatgccctcagacaaaaagaaagttgacatataaagaagccttagaaaaagctgattttgatttccacacaggacttaaactgttagaagtatctgagcccctgatgacaggaatttctagcctctactattcttcctaatgggacatgtttaaataactgtgcaaggggtgatgcaggctggttcatgccactttttcagagtatgatgatatcggctacatatgcagtctgtgaattatgtaacatactctatttcttgagggctgcaaattgctaagtgctcaaaatagagtaagttttaaattgaaaattacataagatttaatgcccttcaaatggtttcatttagccttgagaatggttttttgaaacttggccacactaaaatgtttttttttttttacgtagaatgtgggataaacttgatgaactccaagttcacagtgtcatttcttcagaactccccttcattgaatagtgatcatttattaaatgataaattgcactcgctgaaagagcacgtcatgaagcaccatggaatcaaagagaaagatataaattcgttcccacagccttcaagctgcagtgttttagattgcttcaaaaaatgaaaaagttttgcctttttcgatatagtgaccttctttgcatattaaaatgtttaccacaatgtcccatttctagttaagtcttcgcacttgaaagctaacattatgaatattatgtgttggaggaggggaaggattttcttcattctgtgtattttccgg

SEQ ID NO: 104 - protein, 2043 aa, Homo sapiens
MVPSVCFTVPPPNKEAVDLANRIEQQYQNVLTLWHESHINMKSVVSWHYLINEIDRIRASNVASIKTMLPGEHQQVLSNLQSRFEDFLEDSQESQVFSGSDITQLEKEVNVCKQYYQELLKSAEREEQEESVYNLYISEVRNIRLRLENCEDRLIRQIRTPLERDDLHESVFRITEQEKLKKELERLKDDLGTITNKCEEFFSQAAASSSVPTLRSELNVVLQNMNQVYSMSSTYIDKLKTVNLVLKNTQAAEALVKLYETKLCEEEAVIADKNNIENLISTLKQWRSEVDEKRQVFHALEDELQKAKAISDEMFKTYKERDLDFDWHKEKADQLVERWQNVHVQIDNRLRDLEGIGKSLKYYRDTYHPLDDWIQQVETTQRKIQENQPENSKTLATQLNQQKMLVSEIEMKQSKMDECQKYAEQYSATVKDYELQTMTYRAMVDSQQKSPVKRRRMQSSADLIIQEFMDLRTRYTALVTLMTQYIKFAGDSLKRLEEEEIKRCKETSEHGAYSDLLQRQKATVLENSKLTGKISELERMVAELKKQKSRVEEELPKVREAAENELRKQQRNVEDISLQKIRAESEAKQYRRELETIVREKEAAERELERVRQLTIEAEAKRAAVEENLLNFRNQLEENTFTRRTLEDHLKRKDLSLNDLEQQKNKLMEELRRKRDNEEELLKLIKQMEKDLAFQKQVAEKQLKEKQKIELEARRKITEIQYTCRENALPVCPITQATSCRAVTGLQQEHDKQKAEELKQQVDELTAANRKAEQDMRELTYELNALQLEKTSSEEKARLLKDKLDETNNTLRCLKLELERKDQAEKGYSQQLRELGRQLNQTTGKAEEAMQEASDLKKIKRNYQLELESLNHEKGKLQREVDRITRAHAVAEKNIQHLNSQIHSFRDEKELERLQICQRKSDHLKEQFEKSHEQLLQNIKAEKENNDKIQRLNEELEKSNECAEMLKQKVEELTRQNNETKLMMQRIQAESENIVLEKQTIQQRCEALKIQADGFKDQLRSTNEHLHKQTKTEQDFQRKIKCLEEDLAKSQNLVSEFKQKCDQQNIIIQNTKKEVRNLNAELNASKEEKRRGEQKVQLQQAQVQELNNRLKKVQDELHLKTIEEQMTHRKMVLFQEESGKFKQSAEEFRKKMEKLMESKVITENDISGIRLDFVSLQQENSRAQENAKLCETNIKELERQLQQYREQMQQGQHMEANHYQKCQKLEDELIAQKREVENLKQKMDQQIKEHEHQLVLLQCEIQKKSTAKDCTFKPDFEMTVKECQHSGELSSRNTGHLHPTPRSPLLRWTQEPQPLEEKWQHRVVEQIPKEVQFQPPGAPLEKEKSQQCYSEYFSQTSTELQITFDETNPITRLSEIEKIRDQALNNSRPPVRYQDNACEMELVKVLTPLEIAKNKQYDMHTEVTTLKQEKNPVPSAEEWMLEGCRASGGLKKGDFLKKGLEPETFQNFDGDHACSVRDDEFKFQGLRHTVTARQLVEAKLLDMRTIEQLRLGLKTVEEVQKTLNKFLTKATSIAGLYLESTKEKISFASAAERIIIDKMVALAFLEAQAATGFIIDPISGQTYSVEDAVLKGVVDPEFRIRLLEAEKAAVGYSYSSKTLSVFQAMENRMLDRQKGKHILEAQIASGGVIDPVRGIRVPPEIALQQGLLNNAILQFLHEPSSNTRVFPNPNNKQALYYSELLRMCVFDVESQCFLFPFGERNISNLNVKKTHRISVVDTKTGSELTVYEAFQRNLIEKSIYLELSGQQYQWKEAMFFESYGHSSHMLTDTKTGLHFNINEAIEQGTIDKALVKKYQEGLITLTELADSLLSRLVPKKDLHSPVAGYWLTASGERISVLKASRRNLVDRITALRCLEAQVSTGGIIDPLTGKKYRVAEALHRGLVDEGFAQQLRQCELVITGIGHPITNKMMSVVEAVNANIINKEMGIRCLEFQYLTGGLIEPQVHSRLSIEEALQVGIIDVLIATKLKDQKSYVRNIICPQTKRKLTYKEALEKADFDFHTGLKLLEVSEPLMTGISSLYYSS

SEQ ID NO: 105 - DNA, 7833 bp, Mus musculus
  CDS (1)..(7833)
atgagaatctcctgtccgttcattgtggtcccactgatcaactcctgcattagcttcagtaatgagtccttggatggacacaggttggatatgctgcagcagattgccacccgagttcagagggatagtgtcagctgcgaagacaaactcatcctcgcccgaaatgctctccagtctgattccaaaagattagagtcgggagtccagtttcagaatgaagcagagattgccgggtacatacttgaatgtgagaaccttttacgccagcatgtgattgatgtacagattctgatagatgggaaatactaccaggccgatcagctggtgcagagggttgcaaagctgcgtgatgagattatggccttaaggaacgaatgttcttcggtgtacagcaaaggacgcatgctgaccacggaacagaccaagctcatgatatcaggaatcactcaaagcttaaactcaggatttgcacaaaccttacaccccagcctgaactcagggctaacccagagtttaaccccttccttgacgtcttctagcgtgacttctggcttgtcgtccgggatgacttcccgcctgacgccatcagttactccggtgtatgcacctgggttcccttcagttgtagctccaaacttcagtttaggggtagagccaaattcattacagactctgaagctaatgcagatccgaaagccccttctcaagtcgtctttgctggatcagaacttgacagaagaggaagtcaatatgaaatttgttcaagatctcttgaactgggttgatgagatgcaggtgcagctggaccgcactgaatggggctcagatttgccaagtgttgaaagccatttagaaaaccataaaaatgttcaccgagccattgaagaatttgaatccagccttaaggaagctaaaattagtgagattcagatgacagcgcctctgaaactctcttacacagataagttgcacagattagagagtcagtacgctaaactcttgaatacatccagaaatcaggagcgacatctcgatacactccacaactttgtaacccgcgcaactaacgagcttatctggttgaatgaaaaggaggagtcggaagttgcttatgattggagtgagagaaacagcagtgtcgcccggaagaaaagctaccacgtggagctgatgcgggagctggagcagaaggaggagagcattaaagctgttcaggagatcgcagagcagctgcttctggaaaaccacccagcccgcttgaccatcgaggcgtacagagcggccatgcagacacagtggagctggatcctacagctgtgccagtgcgtggagcagcacattcaggagaactctgcctatttcgagtttttcaatgatgccaaagaagccactgattacctaaggaatctgaaagatgccatccagcgcaagtacagctgtgacaggtccagcagcattcacaaactggaagaccttgtccaggagtccatggaaaaggaggagctcctgcagtaccggagtgtggtggcagggctgatggggcgagcgaagacagtggtgcagctgaagccgaggaatcctgacaacccactcaagacgtccatccccatcaaagccatctgcgactacagacagattgagataaccatttacaaagacgatgagtgtgtcttggcaaacaactctcatcgagctaaatggaaggtcatcagtcctactgggaacgaggccgtggtcccgtctgtgtgctttactgttcccccaccaaacaaagaagcagttgactttgccaacagaattgagcaacagtatcagagtgtactcactctctggcatgagtctcacataaacatgaagagtgtcgtctcctggcactatctagtcaatgaaatcgacagaattcgagctagtaatgtggcttcgataaagacgatgttgcctggcgagcaccagcaggttctcagtaatctccagtcccgcttggaggatttcctggaggatagccaggaatcccagatattctcaggctcggatataagtcaactagaaaaggaagtgagtgtgtgcaggaagtattatcaagagctcctcaagtctgcagaaagagaggagcaagaggaatctgtgtataatctttacatctcggaagtgcgaaacattcggctccgcctggagagctgtgaagacaggttgattcggcagatccggactcccctggaaagagatgatttacatgaaagcatgctcaggatcacggagcaggagaaactgaagaaagagctggatcggcttaaagatgacttgggaacgatcacaaataagtgtgaagagtttttcagccaagcggctgactcgccgtctgtccccgctctccgatcagagctcagcgtggtcattcagagcttgagtcagatctactctatgtcttccacgtacatagagaaattgaagactgtgaatttggttttaaaaaacactcaagccgcagaagcccttgtcaaactctacgaaaccaaactgtgtgaagaggaagcagttatagcagacaagaataacattgagaatttaatgagtactttaaagcaatggcgatcagaagtagatgagaagagagaggtgttccatgcattggaagacgagttgcagaaagcaaaagccatcagcgatgagatgttcaagacacacaaagaacgggaccttgactttgactggcacaaagaaaaggcagaccagcttgtcgaaaggtggcagagcgttcacgtccagatcgacaacaggctccgggacttagaaggaatcgggaagtccctgaagcactacagggactcctaccaccctctcgatgactggatccagcacattgaaacgacccagagaaaaattcaggaaaatcagccagaaaacagcaaagccctggccctgcagctgaaccaacagaagatgctggtgtctgaaatagaggtgaagcagagcaaaatggacgagtgtcagaaatactcagagcagtactcggctgccgtcaaggactatgagttgcaaacaatgacctacagggctatggtggagtcccagcagaagtcgccagtgaagcgacggcggatacagagctcagcagacctcgttattcaagagttcatggacctacggacacggtacactgccctggtcactcttatgacgcagtatattaaatttgctggtgattcgttgaaaaggctggaagaggaggagatgaaaaggtctaaagagaattctgagcacggggcgtattcagatctactgcagcgtcagagagcaaccatggttgagaatagcaaacttaccgggaagatcagtgaactggaaacaatggtggctgagctaaagaaacagaaatcccgggtcgaggaggagcttccgaaagttaaggaggccgccgaaaatgaactgaggaagcaacagaggaacgtggaagacatcgccctgcagaagctgagggccgagagcgaggccaagcagtaccgccgtgagctggagacgatcgtgagggagaaggaagctgccgagcgggagctggagcgggtgaggcagctcacggcggaggcggaagctcggcgagccgcggtggaggagaacctccgcaacttccggagccagctgcaggaaaacaccttcaccaggcagacgctggaagatcatctgcggaggaaagactcgagcctcagtgatctggaacagcagaaacgggccctggtggaagaactgcaacgaaagcgggaccacgaggaggagctcctgcgactggtgaagcagatggagcgggacctggccttccagaagcaggtggccgagaagcagctgaaggaaaagcagaaggtcgagttggaagccagaaggaaaatcaccgaaattcagttttcatgtagagagagcgctgcggtggcacaggcacggccccagagggagcagggcagacagaaagaggaggagctgaagcagcaggtggatgagctgaccttggccaataggaaggcagagaaagagatgagggagctgaagtatgaactcagcgcggtccagctcgaaaaggcctcgtctgaggaaaaggcccggctgttgaaggataaattggacgagacgaataacacactcaagtgcctcaaggaagatctggaaaggaaggatcaggcccaggaacgctattcccagcagctcagagaccttggcgggcagctgaaccaaacaacagacaaagctgaagaggtcaggcaggaagcaaacgatctcaagaaaataaagcacacctatcagttggaattagagtctctccatcaagagaaaggaaaactccagagggaagttgacagagtcaccagggcgcacgcactagccgagaggaacattcagtgtttaaactcccaagttcacgcttcgagggatgagaaggacctctcagaagagaggagacggctctgccagagaaaatcagaccatttaaaagaagagtttgagaggagccatgcacagttgcttcagaatattcaagccgagaaagaaaataatgataaaatccaaaagctgaataaagagctggagaaaagcaatgagtgcgcagaaacgctcaagcagaaggtggatgaactcactaggcagaataatgaaaccaaattgatgatgcagaggattcaggcagagtccaagaacatagtccgcgagaagcaagccatccagcagagatgcgaagtgctgcggatccaggcagacggttttaaggatcagttacggaacaccaacgaacacttgcataagcagacaaaaacagagcaggatttccacagaaaaattaaaagcctcgaagatgatctagcccaaagtcaaaacctagtaagcgagttcaagcaaaagtgtgaccagcagagcatgatcatccagaaaacggagaaggaggtgaggagcctgagcgcagaactgagcgcgtccaaagaggagaagcggcgggaagagcagaaggctcagctgcagcgagctcaggtgcaggagctgaatgacaggctgaagagggtgcaagacgagctgcacctgaagaccatcgaagagcagatgacccacaggaagatgatcctgctccaggaagagtcggataagttcaaacgctcggcagatgagtttcggaagaagatggagaagctaatggagtccaaggtcgtcactgaaaccgatctctcaggcatcaagcacgactttgtgtctctccagagagaaaacttccgggcgcaagagaacgcgaagctgtgggagaccaacattcgagagcttgagcggcagcttcagtgctaccgtgagaagatgcagcaaggcccgcccgtggaagcaaaccactatcagaagtgccggagactcgaggaggagctgttggcccagagacgggaagttgaaaacctcaaacaaaaaatggaccagcagataaaggaacatgagcaccagttgcttcggctccagtgtgaaatccaaaagaagagcacaacccaagaccacaccttcgcgtcggcttttgatacggcagggagagagtgccaccaccctgcagagatctcccctgggaactctgggcaccttaacctaaagaccagactcccactgtccaggtggactcaggagccacaccagacagaaggaaaatggccgcacagggctgctgaacaacttccgaaggaggttcagttccgacagccaggggctccgctggacagggagagcagccagccatgctactcggagtatttttctcagacaagcactgaactgcagataacttttgatgataaaaacccaatcacgcgactgtctgaactagagacgatgagggagcaagccctgcatccctccagaccgccggtgacgtatcaggatgacaaacttgaaagggagttggtgaagcttttgacacccttagagatagctaagaacaaacagtgtggcatgcatacagaagtcacgaccttaaaacaagagaagaggctgggttccagtgctggtggatggatgctggaagggtgcagaacatctggtggactcaagggagatttccttaagaaaagcgtagagccagaggcttccccgagccttgaccttaaccaggcgtgctctgttagggatgaggagtttcagtttcaagggctcaggcacaccgtgactggcaggcagctggtcgaagccaagctcctggacatgaggacagttgagcagctgcggcttggtctgaagactgtcgaagaagttcagagaagtcttagcaagtttctgaccaaagctacctccattgcaggactttatctagaatcttccaaagaaaaaatgtcgttcacttcggcggcccagaaaatcataatagacaaaatgatagctctagcctttttagaagctcaggctgcaacaggttttataattgatccggtttctggtcagacttactgtgttgaagatgcagttcttcatggcatcgttgatcctgagttcaggagcaggctcctggaggcagagaaggcagttttgggatattcacatgcttctaagacgctgtcagtgttccaggcaatggaaaatagaatgcttgataggaagaaaggtaaacatatcttggaggcacaaattgccagtgggggcgtcattgaccctgtgagaggcgtccgtgtccctccagaaatggctgtgcagcagggcttgctgaacaacgccgtcctacagttcctgcatgaaccgtccagcaacacgagagtctttcctaatcccaacaacaagcaggctctgtattattcggagttactgcagatctgtgtgtttgatgtagattgccagtgttttctcttgccgtttggggagagggaaatatccaatctcaacatagagaaaactcataaaattgccgtggtagataccaaaactggggcggaactgacggcattcgaggctttccagagaaacctgattgacaagggtatttatctcgaactctcagggcagcagtatcagtggaaggaagctacattttttgactcctacgggcatccttctcacatgctgactgatactaaaactggtctgcagttcaatattagtgaagctgtcgagcagggaacgctagacaaagccttggtgcaaaagtatcaggaaggcctaactacactaacagaactggctgactttcttctgagcaaggtagttcccaagaaggatttgcacagtcccattgcaggctattggctgaccgctagtggggagcgaatctccttgctgaaagcctcccgtagaaacttggttgatagggttacagccctcagatgccttgaagcccaaatctgtacaggagggatcatcgatcccctaactgggaaaaagtacagggtggccgaggctttgcatagagggctggtggacgagggcttcgcccagcagctacgccagtgtgaattagtgatcacggggatcagccaccccgtcagcaataaaatgatgtcagtggtggaagccgtgaatgcaaatatcatcagtaaagaaatgggcatgcggtgcctggaatttcagtacctgacagggggcctgatagagccgaaggttttctcgaggctgaccatagaagaggcccttcacgtcggtatcattgatgtcctcatcgccaccagactcaaagatcaaaagtcatatgtcagggatataatgtgcccccagactaagagaaaattgacatataaagaggccctggagaaagctgattttgatttccacacaggacttaagctgttagaagtgtctgaacccttggggacagggatatccaacctctactattcttcccag

SEQ ID NO: 106 - protein, 2611 aa, Mus musculus
MRISCPFIVVPLINSCISFSNESLDGHRLDMLQQIATRVQRDSVSCEDKLILARNALQSDSKRLESGVQFQNEAEIAGYILECENLLRQHVIDVQILIDGKYYQADQLVQRVAKLRDEIMALRNECSSVYSKGRMLTTEQTKLMISGITQSLNSGFAQTLHPSLNSGLTQSLTPSLTSSSVTSGLSSGMTSRLTPSVTPVYAPGFPSVVAPNFSLGVEPNSLQTLKLMQIRKPLLKSSLLDQNLTEEEVNMKFVQDLLNWVDEMQVQLDRTEWGSDLPSVESHLENHKNVHRAIEEFESSLKEAKISEIQMTAPLKLSYTDKLHRLESQYAKLLNTSRNQERHLDTLHNFVTRATNELIWLNEKEESEVAYDWSERNSSVARKKSYHVELMRELEQKEESIKAVQEIAEQLLLENHPARLTIEAYRAAMQTQWSWILQLCQCVEQHIQENSAYFEFFNDAKEATDYLRNLKDAIQRKYSCDRSSSIHKLEDLVQESMEKEELLQYRSVVAGLMGRAKTVVQLKPRNPDNPLKTSIPIKAICDYRQIEITIYKDDECVLANNSHRAKWKVISPTGNEAVVPSVCFTVPPPNKEAVDFANRIEQQYQSVLTLWHESHINMKSVVSWHYLVNEIDRIRASNVASIKTMLPGEHQQVLSNLQSRLEDFLEDSQESQIFSGSDISQLEKEVSVCRKYYQELLKSAEREEQEESVYNLYISEVRNIRLRLESCEDRLIRQIRTPLERDDLHESMLRITEQEKLKKELDRLKDDLGTITNKCEEFFSQAADSPSVPALRSELSVVIQSLSQIYSMSSTYIEKLKTVNLVLKNTQAAEALVKLYETKLCEEEAVIADKNNIENLMSTLKQWRSEVDEKREVFHALEDELQKAKAISDEMFKTHKERDLDFDWHKEKADQLVERWQSVHVQIDNRLRDLEGIGKSLKHYRDSYHPLDDWIQHIETTQRKIQENQPENSKALALQLNQQKMLVSEIEVKQSKMDECQKYSEQYSAAVKDYELQTMTYRAMVESQQKSPVKRRRIQSSADLVIQEFMDLRTRYTALVTLMTQYIKFAGDSLKRLEEEEMKRSKENSEHGAYSDLLQRQRATMVENSKLTGKISELETMVAELKKQKSRVEEELPKVKEAAENELRKQQRNVEDIALQKLRAESEAKQYRRELETIVREKEAAERELERVRQLTAEAEARRAAVEENLRNFRSQLQENTFTRQTLEDHLRRKDSSLSDLEQQKRALVEELQRKRDHEEELLRLVKQMERDLAFQKQVAEKQLKEKQKVELEARRKITEIQFSCRESAAVAQARPQREQGRQKEEELKQQVDELTLANRKAEKEMRELKYELSAVQLEKASSEEKARLLKDKLDETNNTLKCLKEDLERKDQAQERYSQQLRDLGGQLNQTTDKAEEVRQEANDLKKIKHTYQLELESLHQEKGKLQREVDRVTRAHALAERNIQCLNSQVHASRDEKDLSEERRRLCQRKSDHLKEEFERSHAQLLQNIQAEKENNDKIQKLNKELEKSNECAETLKQKVDELTRQNNETKLMMQRIQAESKNIVREKQAIQQRCEVLRIQADGFKDQLRNTNEHLHKQTKTEQDFHRKIKSLEDDLAQSQNLVSEFKQKCDQQSMIIQKTEKEVRSLSAELSASKEEKRREEQKAQLQRAQVQELNDRLKRVQDELHLKTIEEQMTHRKMILLQEESDKFKRSADEFRKKMEKLMESKVVTETDLSGIKHDFVSLQRENFRAQENAKLWETNIRELERQLQCYREKMQQGPPVEANHYQKCRRLEEELLAQRREVENLKQKMDQQIKEHEHQLLRLQCEIQKKSTTQDHTFASAFDTAGRECHHPAEISPGNSGHLNLKTRLPLSRWTQEPHQTEGKWPHRAAEQLPKEVQFRQPGAPLDRESSQPCYSEYFSQTSTELQITFDDKNPITRLSELETMREQALHPSRPPVTYQDDKLERELVKLLTPLEIAKNKQCGMHTEVTTLKQEKRLGSSAGGWMLEGCRTSGGLKGDFLKKSVEPEASPSLDLNQACSVRDEEFQFQGLRHTVTGRQLVEAKLLDMRTVEQLRLGLKTVEEVQRSLSKFLTKATSIAGLYLESSKEKMSFTSAAQKIIIDKMIALAFLEAQAATGFIIDPVSGQTYCVEDAVLHGIVDPEFRSRLLEAEKAVLGYSHASKTLSVFQAMENRMLDRKKGKHILEAQIASGGVIDPVRGVRVPPEMAVQQGLLNNAVLQFLHEPSSNTRVFPNPNNKQALYYSELLQICVFDVDCQCFLLPFGEREISNLNIEKTHKIAVVDTKTGAELTAFEAFQRNLIDKGIYLELSGQQYQWKEATFFDSYGHPSHMLTDTKTGLQFNISEAVEQGTLDKALVQKYQEGLTTLTELADFLLSKVVPKKDLHSPIAGYWLTASGERISLLKASRRNLVDRVTALRCLEAQICTGGIIDPLTGKKYRVAEALHRGLVDEGFAQQLRQCELVITGISHPVSNKMMSVVEAVNANIISKEMGMRCLEFQYLTGGLIEPKVFSRLTIEEALHVGIIDVLIATRLKDQKSYVRDIMCPQTKRKLTYKEALEKADFDFHTGLKLLEVSEPLGTGISNLYYSSQ

SEQ ID NO: 107 - DNA, 1914 bp, Mus musculus
  CDS (1)..(1914)
atgccaaggctcctgagaggtgtcttctgtgtcgttgagatattccacaagtacgccattgaggatggcgtcaaccaggcaacactgacccgcacagagctgagacagctccttgagggagaaattggggacttccttcagccacatgtctttcatgctgtggagagaaagttgaaccttctgaattttgacagagatggtaccatcagttttgaggaatttgttcttgcaatcttcagcttattgaatccctcttattttgacatatcattactaaattcagaaccaagactgatgtctaaatcagagaagatagatgctgtggatttgggggcaattggtggaaacattcagcaggtagtaggggttgggccaactcaagaaaggctcatatttccatcagaaatggcatcatcaggtcagcccagcaatgaagaaggtgaggtaggtgatgagcctatggtgagcccatgtgaagacattaagacccacagcctgccaagaaatgtgtctgagccaaatgaccctgagaaccaacagccaaaagaagatgctcaggaagtcgcacaaaatgtaccagcaactgaatatgatggagtccaatttaagagaaatacagtagtcgaagtacccaaacagagcaccagtccaacacaggagatcccaagagaaagaagtaaaccatccaggaggctaagtgacaccaagataagtgaccatatgattcagaggccaactgaagatgaggaacatacttctacaacacaagatccattcctgcaaaaaagagacaaagccaccgggtcagagaacactgatttgtcagtagtagctgctaccaggaaatcatctcaaacacaggaaatttttgagcctatggatgatactaaactatctgaggctcaagaaactggaaaggatgctggcagaataccacctgaaacaaatttagaggagccccaagctgatgctaaagtagctgagagccacggattgccagcacaagaaagagaacacaatacaagggaccagtctgttcaaagccggagcagaaatgtttcagaaacatctagtagaggagaacaggagggggagtggaaagaacatgaaagaataactctatccccaacagcagatgctgaaacacaggatgagaagtgtcaagaatttccaggatcatggagggaaaacgatgccaaaaaggactctgctgcaaaagatccaagttctgaagaaggaaatcagaatctccctgaaattaaggaagattctgtctcaggaaaagaagcaagacacagtgaggaagacacagtatatgcatttgaaatcaacaaaaacagccctgcagctgaagagacattggaaacaagagaaaggtcccaggagctggcaccacttgagaagcaatctcaaagaaaaaagcacagggccaccaggattcaggacaagccggtcaggaaggaggaccacaatgagggagaagattctgagttatcacttacacagagtgatgagggcttttgtgaaattcccaacagcctggctccagaggtaggtaagagcagctcagagatagctgaaccacatgtaccagaggattcacagagtcagatagaccaccatggagatgctaagcaagaaagtcacactaacaacccagatccccagaagcagggagcaccaggtgagagcagcagagagcaggaggcagtagtgctgtcaatccaagaagatgggcagctcccagagggacaggaacagtctgccagagatggtctgcatgatggtctgagctcaaggaccaaaggaggcccaggggcagctgtggagcccagtgagggagaggaggtacaggaggccacagcagggagagaaaacaggaaagccctagaggcagagagtttggaggcccag

SEQ ID NO: 108 - protein, 638 aa, Mus musculus
MPRLLRGVFCVVEIFHKYAIEDGVNQATLTRTELRQLLEGEIGDFLQPHVFHAVERKLNLLNFDRDGTISFEEFVLAIFSLLNPSYFDISLLNSEPRLMSKSEKIDAVDLGAIGGNIQQVVGVGPTQERLIFPSEMASSGQPSNEEGEVGDEPMVSPCEDIKTHSLPRNVSEPNDPENQQPKEDAQEVAQNVPATEYDGVQFKRNTVVEVPKQSTSPTQEIPRERSKPSRRLSDTKISDHMIQRPTEDEEHTSTTQDPFLQKRDKATGSENTDLSVVAATRKSSQTQEIFEPMDDTKLSEAQETGKDAGRIPPETNLEEPQADAKVAESHGLPAQEREHNTRDQSVQSRSRNVSETSSRGEQEGEWKEHERITLSPTADAETQDEKCQEFPGSWRENDAKKDSAAKDPSSEEGNQNLPEIKEDSVSGKEARHSEEDTVYAFEINKNSPAAEETLETRERSQELAPLEKQSQRKKHRATRIQDKPVRKEDHNEGEDSELSLTQSDEGFCEIPNSLAPEVGKSSSEIAEPHVPEDSQSQIDHHGDAKQESHTNNPDPQKQGAPGESSREQEAVVLSIQEDGQLPEGQEQSARDGLHDGLSSRTKGGPGAAVEPSEGEEVQEATAGRENRKALEAESLEAQ

SEQ ID NO: 109 - DNA, 2793 bp, Bos taurus
  CDS (1)..(2793)
atggagacagcacaggctcagagaaatttagttgagaagggcttcaactctgattcaggctttgcaatttacttgagactcaataaaaggtttgagcacctcctgtcagctcacagccgctgccccacattccacttgctctcactcgagaacaagtctcctgagtttgtaaagatgcctcagctcctgagagacatcctctgtgtaattgagacattccacaagtacgccagggaggatgcagcgacgctgacctgcacagagctgaaacagctcatccagagcgaatttgaggacatttttcagccatgtgccatccacgctgtggagagaaacttgaatcttctgaatatcgacagtaatggcgccatcagctttgatgaatttgttcttgcaatcttcagctttttgaatgtctgttaccttgacacacagtcattactaaactcagaaccaagacaagtatctaaaccagaggggatgccacatgatatgggtcttcaggtgacgaatgaaactgaccagtggacagaaggaacttcacaaactcaagacaaagtggtgcttccttcaggaacggcatcatcaactcatctcagcctcgaagagagagcagttgaacacaatagggtggacccacagggacataccacagctcacaaactaccagtagaaacgtctgaacacagtgactctaagaaccaacatctgaaaggagatgaacagagccagaaagtggaccaagatgtatcagcaacaggtgacagtagaacccaacgtgagacaagtaagccaatggcaggatcagaacagatcagcagtcacacaaagggggagggacagaataaggagattctccagaagggagatatactagccaggaaacaaagtggcactgagacaggaggacggtttggagaacaggaagggagcttgggaatcctgcattctccactggaagaaaccacacagaggcctggtggatcatctgaggatcaggaagttgcaggagagaagggtgttaagggacaccctaaatcacaagaaccatcagtacagggaaaagatgagcccagttcagaacatgtcgacctgccaaaacaagctgctgctcggaaaccatctcagacacagaaatcagctgctgccaaggatgagagtagaacagctgagactccagaaccacccatacaagaaaaagaatatgaaacaagggacttgtcagtccaaggtgagaacagaaatgtttcagaaacacccatggttagagttgaaaggaagggtgtaagaggtccagaggtccatcaaacagtagggcagaaacaaattgaggaaaaaactcagccaccagctctggaagagccaacagaagataagaagtatcatgaactccaggaatcatcaaaagaaaagaatgctggagaagattctgagacacatgagttaaactcagaaggaggagaacagaaagattccgaaagtgaaggagccatcagcccaggagaagaggcaagacatgctgaggaaggcacagcagaagcacttgtgaacagtaaaaatgcccctgaagcagaagggacaccaggaacaagagaaagaatatgggagttgacaacacttgagaaccaatctggagaaaaaaataagatgaccaccaaaattcatgacaagttggtcaaggaagatgacggctaccagggggaaggttctgagccagtggccacacagaatgatgagaggtctcctgaaacccccaacagcctgactgcagaggatggtgacagcaactcagagacaagtgatctgtttgtgcaaggggattcccaaagtcaaacaaacccattcagagggtctgtgcaaggaagtgacagtaataacccagaaactcagaaacacttagcactgagtgaggaaaagagagttcaggaggcagcagtgctggcagtcagaggagaggatgagcaggtcacagaggaacatgcacaggagcacgagggtcagggctcagcgacaacaggccgaggcccagctgtggagcccaggggacactccgacacgcaggtgttcatagtgagagatgaaaacacaaagtccctggagccagggatcccaggtgccccaaatgcaggcatcaccaaacagctttccgtaaggcaactccctacaaagaaagacagtagaaaagagctaaaggaccagagcccaagtaccaaaaaagaggaagatggagccctagaagcccaggaggatttagtaaaaagtctggatgagaacaatgcagtctcccaaaagacatgccctgcaacactggaggaggagactgaaagcccccaacagctggcaggagaacaaagtctctctacaaaagaacatgatccttcagtctctgagtcaggccttgaagagaggatgcagagagaccaagaactctgtttggtggagagaggtgcagaacactctagtcccctgtacgaggccctgcaggagaagatgctgcagcaaacaaacgtaacccaagggaagcatcaaaatcaagctcagacagccagtgtagcaagcccagagatccgcagaaaccagtcgagtgcatccctcaccaatgacagctcagatggtcttgtcttttttattgacagacaagcactacaaaagtacatcagggagtttctgcctgatgaggatcctactggtgcacagcaaatatcagctccccaggccttggaagataagcagggtcgccctcaaagagaggaactagaaccacaaaaggaagcaagcactccaaagcaatga

SEQ ID NO: 110 - protein, 930 aa, Bos taurus
METAQAQRNLVEKGFNSDSGFAIYLRLNKRFEHLLSAHSRCPTFHLLSLENKSPEFVKMPQLLRDILCVIETFHKYAREDAATLTCTELKQLIQSEFEDIFQPCAIHAVERNLNLLNIDSNGAISFDEFVLAIFSFLNVCYLDTQSLLNSEPRQVSKPEGMPHDMGLQVTNETDQWTEGTSQTQDKVVLPSGTASSTHLSLEERAVEHNRVDPQGHTTAHKLPVETSEHSDSKNQHLKGDEQSQKVDQDVSATGDSRTQRETSKPMAGSEQISSHTKGEGQNKEILQKGDILARKQSGTETGGRFGEQEGSLGILHSPLEETTQRPGGSSEDQEVAGEKGVKGHPKSQEPSVQGKDEPSSEHVDLPKQAAARKPSQTQKSAAAKDESRTAETPEPPIQEKEYETRDLSVQGENRNVSETPMVRVERKGVRGPEVHQTVGQKQIEEKTQPPALEEPTEDKKYHELQESSKEKNAGEDSETHELNSEGGEQKDSESEGAISPGEEARHAEEGTAEALVNSKNAPEAEGTPGTRERIWELTTLENQSGEKNKMTTKIHDKLVKEDDGYQGEGSEPVATQNDERSPETPNSLTAEDGDSNSETSDLFVQGDSQSQTNPFRGSVQGSDSNNPETQKHLALSEEKRVQEAAVLAVRGEDEQVTEEHAQEHEGQGSATTGRGPAVEPRGHSDTQVFIVRDENTKSLEPGIPGAPNAGITKQLSVRQLPTKKDSRKELKDQSPSTKKEEDGALEAQEDLVKSLDENNAVSQKTCPATLEEETESPQQLAGEQSLSTKEHDPSVSESGLEERMQRDQELCLVERGAEHSSPLYEALQEKMLQQTNVTQGKHQNQAQTASVASPEIRRNQSSASLTNDSSDGLVFFIDRQALQKYIREFLPDEDPTGAQQISAPQALEDKQGRPQREELEPQKEASTPKQ

SEQ ID NO: 111 - DNA, 2712 bp, Homo sapiens
  CDS (1)..(2712)
atgcctcagctcctgagaaatgtcctctgtgtaattgagacattccacaaatatgccagtgaggacagtaacggggcaacactgactggcagagagctgaaacaactcatccagggcgagtttggggacttttttcagccctgtgtccttcatgctgtggaaaaaaattcaaatcttctgaatattgacagtaatggcatcatcagttttgatgaatttgttcttgcaatcttcaacttgttgaacctctgttatcttgacataaaatcattactaagttctgaactaagacaggtgactaaaccagagaaggagaagctagatgatgtggatgttcaggcaaccaccggagatggtcagtggacagtgggaacttcaccaactcaagaaaagaggatgcttccttcaggaatggcatcatcatctcagctcatccctgaagaaagtggagcagttggaaataacagagtggacccatggagagaagccaagactcacaactttccaggagaagcatctgaacacaatgatcctaagaacaaacacctggaaggagatgaacaaagtcaggaagtggctcaagatatacaaacaacagaagacaatgaaggccaacttaagacaaataagccaatggcaggatcaaaaaagaccagcagtcccacagagaggaagggacaagataaggagatctcccaggaaggagatgaaccagccagagagcaaagtgtttccaagataagagaccagtttggagaacaggaaggaaacttggcaacccaaagttcaccaccaaaagaagcaacacaaagaccatgtgaagatcaggaagttagaacagaaaaggaaaaacactctaatatacaagaaccacccctacaaagagaagatgagcccagttcacagcatgctgacctgccagaacaagctgctgccaggtcaccatctcagacacagaaatcaactgattccaaggatgtctgtagaatgtttgacactcaagaaccaggaaaggatgctgaccagacaccagctaaaacaaagaatttgggtgaacctgaggattatggcagaacatctgagacccaagaaaaagaatgtgaaacaaaggacctgccagtccaatatggtagcagaaatggttcagaaacatctgacatgagagatgaaaggaaagagaggagaggtcctgaggcccatggaacagcagggcagaaagaacgtgacagaaaaactcggccactagtcctggaaacccaaacacaggatgggaagtatcaggaactccaaggattatcaaaatcaaaagatgctgaaaaaggttctgagacacaatatctaagctcagaaggaggagatcagactcaccctgaacttgaaggaacagcagtctcaggagaagaggcagaacacaccaaagaaggcacagcagaagcatttgtgaacagcaaaaacgcacctgcagcagaaaggacactgggggcaagagaaagaacacaagatttagcaccacttgagaagcagtctgtaggagaaaatactagggtcaccaagactcatgaccaaccagttgaggaggaggatggttaccagggggaggaccctgagtcaccattcacacagagtgatgaggggtcttctgaaactcccaacagcctggcttcagaggaaggcaatagcagctcagagacaggtgaactgcctgtgcaaggggactcccagagtcaaggggaccaacatggagagtctgtgcaaggaggtcacaataataacccagatacccagaggcagggaacacctggtgagaaaaacagagctctggaggcagtggtaccagcagtcagaggagaggatgtacagctcacagaggaccaggaacagcctgccagaggagaacacaagaatcaaggcccagggaccaaaggcccaggtgcagctgtggagcccaatggacacccagaagcacaggaatccacagcaggagatgaaaatagaaagtccctggaaatagagatcacaggtgccctggatgaagacttcactgaccagctttccctaatgcagctccctggaaagggagatagcagaaatgaattaaaggtccaaggcccaagtagcaaagaagagaaaggaagagcaacagaggcccagaatactctgttagaaagtctagatgaggacaattcagcctccctcaagatacaacttgaaacaaaggaacctgtaacatcagaggaggaagatgaaagtccccaagagctggcaggagaaggtggtgaccaaaaaagtccagccaagaaagagcacaattcttcagtcccctggtcaagtcttgaaaagcagatgcagagagaccaagagccctgttctgtggagaggggtgcagtctattccagtccactataccagtacctacaggagaagatactgcagcaaacaaatgtaacccaagaggagcatcaaaagcaagttcagatagcccaggcatcaggcccagagctttgcagtgtatccctcaccagtgagatctcagattgttctgtctttttcaactacagccaagcatcacaaccatataccaggggacttccacttgatgagagtcctgctggtgcacaggaaacaccagctccccaggccttggaagataagcaaggtcaccctcagagagagaggctggtactacaaagggaggcaagcaccacaaagcaa

SEQ ID NO: 112 - protein, 904 aa, Homo sapiens
MPQLLRNVLCVIETFHKYASEDSNGATLTGRELKQLIQGEFGDFFQPCVLHAVEKNSNLLNIDSNGIISFDEFVLAIFNLLNLCYLDIKSLLSSELRQVTKPEKEKLDDVDVQATTGDGQWTVGTSPTQEKRMLPSGMASSSQLIPEESGAVGNNRVDPWREAKTHNFPGEASEHNDPKNKHLEGDEQSQEVAQDIQTTEDNEGQLKTNKPMAGSKKTSSPTERKGQDKEISQEGDEPAREQSVSKIRDQFGEQEGNLATQSSPPKEATQRPCEDQEVRTEKEKHSNIQEPPLQREDEPSSQHADLPEQAAARSPSQTQKSTDSKDVCRMFDTQEPGKDADQTPAKTKNLGEPEDYGRTSETQEKECETKDLPVQYGSRNGSETSDMRDERKERRGPEAHGTAGQKERDRKTRPLVLETQTQDGKYQELQGLSKSKDAEKGSETQYLSSEGGDQTHPELEGTAVSGEEAEHTKEGTAEAFVNSKNAPAAERTLGARERTQDLAPLEKQSVGENTRVTKTHDQPVEEEDGYQGEDPESPFTQSDEGSSETPNSLASEEGNSSSETGELPVQGDSQSQGDQHGESVQGGHNNNPDTQRQGTPGEKNRALEAVVPAVRGEDVQLTEDQEQPARGEHKNQGPGTKGPGAAVEPNGHPEAQESTAGDENRKSLEIEITGALDEDFTDQLSLMQLPGKGDSRNELKVQGPSSKEEKGRATEAQNTLLESLDEDNSASLKIQLETKEPVTSEEEDESPQELAGEGGDQKSPAKKEHNSSVPWSSLEKQMQRDQEPCSVERGAVYSSPLYQYLQEKILQQTNVTQEEHQKQVQIAQASGPELCSVSLTSEISDCSVFFNYSQASQPYTRGLPLDESPAGAQETPAPQALEDKQGHPQRERLVLQREASTTKQ

SEQ ID NO: 113 - DNA, 3432 bp, Strongylocentrotus purpuratus
  CDS (1)..(3432)
atggatatagtgctggtgcaagatgagagccagggagatctcaggaaaacagcagggcttatgtctgaggacaaacgtcaacagaaacttggtgaactgaaggagcagcgtcgacagtggagggaaagtggacccaccaaggagactgaggatgaacagacagatattctccggaaaggagtagctgtcttgcttgaaagtcgtctcattgggatgaaagctatccagggtggagaggccactgacggggacgtagaggtcagtctcatcgctgaccttcaagagaaacaggacaaagaggctggctatctcatggatgatcttgagagcaagagtgcaatgaccttaaagcagttgaagcaggtgcagttcatcgcccgagccaacggatggaatgacaatgtggctgccaccgtcctggtgaccaagtctgatacagagatggtgactgaggaacaactcttgaaagctttggagagcaaatatgatgtgatgagagataaactactggcagaggctttgatcaagcagacaggcgaagcagagtgggccaagctcactgaacgtgagcgtcaggctcgtcttatgaaactcaaactccaggaacgtaagatgagacaggagaataagtttgatgaggccaactcccttctcagtcagggtatcaaggatcaagcagaactggctcggttgctaggggcaaccaagacggagcaggaggagaagttaaagcagcgtcttgagagaaagaagcagttgaaggaggaacgtgaggcccaaggattggaggccaatgatgaggtgttggatgagatcgttcaacatgagatgtctcgaaaagaaatcttggaagacagaaagaagagacataacattcttgaaggactaaacaaccactttgaggatgagaagaatgctctgctggctgcgttgaggagtcaggacgataccctgcagagtgagaaggagagacagctggccctggctaagctgaggagggaccaacgcaagctgcaggatgaagagaagtttgaggcagctgctgccctctttggattggcacagcagcatgagaagaccagagaggccaactacgagaaggacaaggagcgtcaaaagcagcttgctagggagaggctggcagctaggagagccaagatggctggtgatgagaaaggggagcaggccaagcatcttactaggtctgacatccaagaacagctcttgctggaggagaaggagaatgccaaagcagatgcagcgcatgccaccaagtcagatccggtatccctggtttctacggtgatggatgaggtagataagaagcagagcagtgagcgagatgtcctggtcactctcatagatggtgccatggctaactccaaggaacgcacaaggctggaggaactagctctcaaggacctgttagcccagctggaagccctgaaagaggagagacgtcagctgcgtgaggattctgatctggagtttggtgatgtagacgtgagtgggcttagtgaggaggagctatccagacatctcacacaggtctctgagtatcaggagcagcagcatcgactcctcaagagcgctataaacatcaagatagaaatgatgcggcgttccttgattgaggagaagcgtttatcactagaagagattgaggaggagcttgctgtcatgatgttatcagagcttcaacagaaacagagtgtagaggtcaatgctcttcatcatgttctagaaggcttcccgggggataatagcaaaccccagggccatccaggtggcctggataagcgacatagtatggcatcgatagcgtctggtgtgggacactcattcaaagaattattcttctcagaatccactgaagtcataaagaatgaagagttccttcaccagatgaaggtcacccagcgcagagctcggcgggagggatggctggacaatgtggcggtcactgtgtttgaccacactacggtcacccttgagatgaccacagagatcgaggagatgactagaaggatccaggctagagagggcgccctgctgaccatggacaaagagcttgaggagaagaaggcggaggttatgaagaatgagagtggcagaactgcagaggaactagatgcaatgattgccaagctagagaaggagtatgcagatagaaagaaggctcttgaggaggagcagaccagggagaggaggcaggaggcagagatgaaagatgtcaaccaggagctggagcagaaggagcaagatcttcagaacctggagcaggagatgcaggaagccattgagaacgagcgtaaacgtcgtccaaatgaggagtttgatgccgaggctatgatggcggaaattgaggctcagtttgctgctaagaaaagggcaatgcaagttcagcttgagaagcagcgtcgtcaggcgatggagaagatagccgccaggaagcagagaatggaagatagaaactatgaagatgagatggctgtggctctgattcatgctgcagagaagagtaaaactcagaaggaagaggcagcggtggagcagaagaacaaacagaatcagctgcctgtcatcactgacccctcaccccggaagcctaagaaaaagggcaagaaaggggtgagttttggggaaccacccaaagctgacaaagtggctggtcctggtctgatgcgagagaagacggtgctggatgtggacatgtccgaggatgagaagcaaaacctgtctaagatgctcctctctcaccatagcaaagcacaatggaagatggagaaggagcgagagaagagggcaaatgagcttaaagaacgactggaaatgcgcaagactcgtatccaggatgctgcaaccaccatcttgggactgggagagagacagaaaactatggtggagaataaaaagaaggatgaaagggagcgtcagatagcgctggtgaaggagcgtgtgcagcgtgtacggtatgaacgcacccagaccatgaagttcaaaggtgacgacaagaaacggttcaaggactacctagagaaggaggattctggtctgtcagaggatgagaagatgacgaagatagctgaccggattaatagccagttcaagaggcatgagtccagctatagggcaggacacaagagtgcctttgaacctgatgaggatgaacttgcatcaaactcctccggttccaagcccgccacaccccagggctccgcccgacccaaaacagggcgtctcctgggccagaaggaaagagagcaattgatcaagtctcgccaggccaagaggagagagatcaagaaggtcaacaacagtatctcagccgcacccgacatggactccctcgccaagatgattgaggaccgcaagaaagccggtatgcagcaggaggaggaggaggaggaggataatggaagtgaggtttaa

SEQ ID NO: 114 - protein, 1143 aa, Strongylocentrotus purpuratus
MDIVLVQDESQGDLRKTAGLMSEDKRQQKLGELKEQRRQWRESGPTKETEDEQTDILRKGVAVLLESRLIGMKAIQGGEATDGDVEVSLIADLQEKQDKEAGYLMDDLESKSAMTLKQLKQVQFIARANGWNDNVAATVLVTKSDTEMVTEEQLLKALESKYDVMRDKLLAEALIKQTGEAEWAKLTERERQARLMKLKLQERKMRQENKFDEANSLLSQGIKDQAELARLLGATKTEQEEKLKQRLERKKQLKEEREAQGLEANDEVLDEIVQHEMSRKEILEDRKKRHNILEGLNNHFEDEKNALLAALRSQDDTLQSEKERQLALAKLRRDQRKLQDEEKFEAAAALFGLAQQHEKTREANYEKDKERQKQLARERLAARRAKMAGDEKGEQAKHLTRSDIQEQLLLEEKENAKADAAHATKSDPVSLVSTVMDEVDKKQSSERDVLVTLIDGAMANSKERTRLEELALKDLLAQLEALKEERRQLREDSDLEFGDVDVSGLSEEELSRHLTQVSEYQEQQHRLLKSAINIKIEMMRRSLIEEKRLSLEEIEEELAVMMLSELQQKQSVEVNALHHVLEGFPGDNSKPQGHPGGLDKRHSMASIASGVGHSFKELFFSESTEVIKNEEFLHQMKVTQRRARREGWLDNVAVTVFDHTTVTLEMTTEIEEMTRRIQAREGALLTMDKELEEKKAEVMKNESGRTAEELDAMIAKLEKEYADRKKALEEEQTRERRQEAEMKDVNQELEQKEQDLQNLEQEMQEAIENERKRRPNEEFDAEAMMAEIEAQFAAKKRAMQVQLEKQRRQAMEKIAARKQRMEDRNYEDEMAVALIHAAEKSKTQKEEAAVEQKNKQNQLPVITDPSPRKPKKKGKKGVSFGEPPKADKVAGPGLMREKTVLDVDMSEDEKQNLSKMLLSHHSKAQWKMEKEREKRANELKERLEMRKTRIQDAATTILGLGERQKTMVENKKKDERERQIALVKERVQRVRYERTQTMKFKGDDKKRFKDYLEKEDSGLSEDEKMTKIADRINSQFKRHESSYRAGHKSAFEPDEDELASNSSGSKPATPQGSARPKTGRLLGQKEREQLIKSRQAKRREIKKVNNSISAAPDMDSLAKMIEDRKKAGMQQEEEEEEDNGSEV

SEQ ID NO: 115 - DNA, 2280 bp, Trypanosoma cruzi
  CDS (1)..(2280)
atgcgcaaaaacgaaagagacgctctttccctgtacgtctcctttgctttcagtcttttatcatatgggaagggattcctgtgcaaatttctggtgtcttttatccatttctctctattttttttttttaatttctgttccttattattattattattttttttttttccattgaggccttatgatgacagaatgaacattattgtgtcttgcagggcgtctgaggttgactcgattacctcattttttcgaaaagagcgaattcccacgcccacggctgtgtgtaccgctgaatctaccgctgactttgtcactcgacatgttcgtgcggtcgtagatggctgtggatccaataataacgatgaggatggtgaggggacgaaggcatcggttgtggacgtcgtggcaatcggagtagatgacgtgatgttggataaattttttttgaacagcctgtctcgtcacgttgtgtgtgcgtttctctccggaggggctgccgttgcggtatcgttggtggtctttccgaccccccatgacgcacggcagaggagcgttgacatcacagcgaaattattcactgaggcagtgggcgatggtggcgtgtacattcacagcgtctcggagtacgacagaatcatagaattgttgacaaacagcccgtccttttgtcacattttcccggtttcctccttgctgctgcggctgtgccctcaaggagaacaagcagcttgtgtggtgaatatgtggtggctgcagacgtcgcatgttcagttattttttcccgctgacggactgcttgacgcgcggcgattgccccatcgtgttgtcgttttccccgtgcgtgacacgaatgagttgcagttgcgattggcttccattggattcatccgtgcagcgaaaggttcccctgacgcgcagcttcaagggcccgttgtggaggagaaggagagggaaatgctgaaggcagatttgcaggcagtgcgtgacgaattcgagtcaactcgtacgaccattcagcagcagaaatccaggaacgaggcgttggaaggcacgatacttcgtttacgtgaaaaggtgcgtggcttggccagggagcaaaggcgtttagagagcgagtgtagcgcggcgcggcactcgagggaacagttggaagaggacatgcgccagcaggtggacatgcgtaatgagatggaaggtcgacgagttgcgcatcttcgccgacagttggagtgggagctgaggatggaaagaggacgcgtagaaagctactgtgcccaccttgcgagaattcgggaggaagaaaataaacgcacagtaatgcacagggaagctctagacagggaaataggcgctgctcgagagcagaaagagaggcttttgggcatcatttcccggaaaaggagggatacatctcttcgttccgtgtttgggacgtctcgatcgacttcgacaagggaaacgagtttgatgagggcgcacacaagcgatgtggaggtgtcgagccgcccatacgaggactcagaactgtgccgtgtgaacgagcaatgccagcgtctcagccgcctgtgtgctgccctccgtgtggaaagggacgagcttgcgactttcgagcaatcatgggcgctaggagtggaagaggacgaggtaagagacagcggtgacgatgatgggtttgagaggggtatccgtctgaagagcgaagatgtgaggcaaatggcgcgggagactctggaaagagaagaacacgtcacgcgagaggctttttgcgccatcgaggaggcaaggagggcggagtttgactgggattgggtggtttgtacgcagtgcctgagctgtgcgtctttatttgtttcaggcgaggggagtcggcctccctacggtgcgagggagcagcaacgacgcgaattgactctttgcgaactcgaacgcgtaggccgattgaaggcggcggtgcaacgggaaatgcaaaggatccacctggaaggtgccatccgcgagcggtccgtgcgccaactcgtggaccagctgcgagtggagtctgagcgactggcccaggaacgcaacgcgtgtgcggaagttatggcgagcgagaaaaaggcggccgaggcggaggcagaggcgttgcggcacacacttcagcttcttcattcatgcatgaatatacgtctccctctttccggcccctttttctccactgggcccggtgggaactggcacacactctctcatgcaataacggctctgggacggcgtgtgcagcgtgaggctgaccttttgtaa

SEQ ID NO: 116 - protein, 759 aa, Trypanosoma cruzi
MRKNERDALSLYVSFAFSLLSYGKGFLCKFLVSFIHFSLFFFFNFCSLLLLLFFFFPLRPYDDRMNIIVSCRASEVDSITSFFRKERIPTPTAVCTAESTADFVTRHVRAVVDGCGSNNNDEDGEGTKASVVDVVAIGVDDVMLDKFFLNSLSRHVVCAFLSGGAAVAVSLVVFPTPHDARQRSVDITAKLFTEAVGDGGVYIHSVSEYDRIIELLTNSPSFCHIFPVSSLLLRLCPQGEQAACVVNMWWLQTSHVQLFFPADGLLDARRLPHRVVVFPVRDTNELQLRLASIGFIRAAKGSPDAQLQGPVVEEKEREMLKADLQAVRDEFESTRTTIQQQKSRNEALEGTILRLREKVRGLAREQRRLESECSAARHSREQLEEDMRQQVDMRNEMEGRRVAHLRRQLEWELRMERGRVESYCAHLARIREEENKRTVMHREALDREIGAAREQKERLLGIISRKRRDTSLRSVFGTSRSTSTRETSLMRAHTSDVEVSSRPYEDSELCRVNEQCQRLSRLCAALRVERDELATFEQSWALGVEEDEVRDSGDDDGFERGIRLKSEDVRQMARETLEREEHVTREAFCAIEEARRAEFDWDWVVCTQCLSCASLFVSGEGSRPPYGAREQQRRELTLCELERVGRLKAAVQREMQRIHLEGAIRERSVRQLVDQLRVESERLAQERNACAEVMASEKKAAEAEAEALRHTLQLLHSCMNIRLPLSGPFFSTGPGGNWHTLSHAITALGRRVQREADLL

SEQ ID NO: 117 - DNA, 3081 bp, Giardia lamblia ATCC 50803
  CDS (1)..(3081)
atgtctagtttcaagcagatcaaccctgcggataagattaccgatccgccgacttccccgcggtccattgtggccatgaacaggtgtgggataacgccaccagacatactttacgtttctcgcgaagaactaaagcatcgcattgcatacaagaatctaacggataaggagtttgtcatctactacgataactatgaggcaatgcggaaagaggctctgagccaagctatagccgagtaccagctaattttagagcaaggaatttcgaaggccgaggctgcgctttacccccacttgcgctttccaaacgttacttcagctccatctacaccgcgaggggggcttttgcagacatccacgcataacccggacgagctcaaggccaaaatcattgaacgtcatattaaggaagtggagctcaatctccgacagcgcattgctaaggaagcacaacaacagcttcaacttgaggctgcacaagagcatcgcctgaaggcccaggagattgaaaatagaatgactgctaagtatgaggacgaggccattaagtacattcttcaggagcagcaccgccttgagatctttagtagctttcagcgccagcaggaggaatgcaggaaacgctcatatgcaaagactatccaggaaatgcatgcacatgatgctctgctccagcgtcgtcagcgttatctcgacgaccaatctgtccgctccaagacgcgctcggttcctcgagaggagttcttgtatcaactggcccaagagcgcaaggcagaagaccgggcacgcgagcttgagttcaaggagcgacaacttattcgagaacaaaggagccagcgtgcacaagaaaagaagcggcaggaagtggagagacttcagcagtctttgcgcgaaaatcagctgcggcacacaaaagtgttcaacgagtattgggaagacgttgctcgttccaaatcagtggatcatgcgctaagggagaaccgtcgtctggcaggtgctaagcgcgcatctacagaaaaattgaaggagaacgccgaacggatcagcgaaaccagtcagcgcatagaagtaacgctgaagaatttcggaaagatatatcgtaataagcaagatgcaaaggcgcgcaaacttgaagaagaggagcttcgctctagcagacacatccttgagacgtctgttaatgcgcgtcaacgagccttagaggacgaactgctgaaggatctacggacaaagagggcggagatgcatcttcggagggttcagtacgagaaagaaaatgtgctctcgaataaggagttcaaggcgataaattccatcagagctctgaacatgacaaaggagaaggaagaggagcttatggccctttcaaacaaactccacactcaaaggcatatactaaaaggtagccaaacaattcgtgatgatggctatttggacattccagatgatcttagaaaactggcgccgcctgagagtattcttaagtgccactatatggacgaggccattgacatgctcaagggagaagaaagctttaagcgcacccttcggatggtgcccgtttcagaatcgtatgcttcagtctataaatcgatagataccgagcctcgtaaaaagaagccaactaagagtcagcatgttgcccgccacaacagtatcagtgatttcagcatggacacgccagacagtgggcgcccgtactatcaggtgaaaaactcgcgcccactaaggtctagctccaacggtgatgggcttctcgttgaaagaaggtctaagagcttaacaaggccgcggacagcatcacgaagtggtcctgcagcactagatagttcccggaccgattccactcctggttcgtcctacttgggaggccatcatagtggagctcaagtagcatctgtaccccttcgacccggtgacgcttcacgaccaaagaaggcagcaaaacgtggctcgtccaagtcgaaagtctcccacaactctatgcgctctgcatctgactccaccattgaaacgcctcagtggagcgattcggtatctagcaacatcagctccacaaagaaaaaagccacccgcctccgaagtgatgacgctaatttgtcggtcagcttgcctctccctgcattgaagggccccgggtcagggttgattgaagaagagaagaagcgcaatgctactgtgcggcaatcaaagaaagaaagaccgagagatagtcagcgaaataaatctaagacagacaccgaagctgcacaggatagccttctgcggaatcaatccctggagatagtccgccaactgagtcaattaacaaaacttaacaagccagctatcagtaactttccaccaccagatgagcgtcgcgagttgcttggcaagctaacaggtgccactcaggaacccgactatgatactgagaatagaacacagcagatatacgctagcctctccatccgtgcaaacgaggcgggtatggatccgaaacagtttgagcaagacgtgttaccagagcacacccagacacggcacctgtttgcttcactgggcaagtctagcacgcctaacgatcacatggatggtgatctaattctcaccacattttccaaagctacgcctgaagcaacgcagatcaacgatgacacacccaaatactttgcgcccggaagcatgaccctcatgcaagaaagtgcaccgccaagccgcaacattggggatggcagcaccaaggactatgtggccactcttgagtatcctaatgtaaaggggaacgacggacttcgtccagccgagctgtccacatactcgattgtcctgcctcccgtgtccgcaggcgcagggattcctcgggtggctcaggagccacaatcccctcagcgcgttgtcaattttgggatagatgtcacggcaagtgatctaaaaataagttcattggaaaaggttccagatacaagtgagccggcatttatcgacgacagcttgccggccgaagaagctgccacagccccgaatacacgcgaatccataggatactttgtctccagcagcgcaaatgtccatggtgacaacacagatgaggaaaattaa

SEQ ID NO: 118 - protein, 1026 aa, Giardia lamblia ATCC 50803
MSSFKQINPADKITDPPTSPRSIVAMNRCGITPPDILYVSREELKHRIAYKNLTDKEFVIYYDNYEAMRKEALSQAIAEYQLILEQGISKAEAALYPHLRFPNVTSAPSTPRGGLLQTSTHNPDELKAKIIERHIKEVELNLRQRIAKEAQQQLQLEAAQEHRLKAQEIENRMTAKYEDEAIKYILQEQHRLEIFSSFQRQQEECRKRSYAKTIQEMHAHDALLQRRQRYLDDQSVRSKTRSVPREEFLYQLAQERKAEDRARELEFKERQLIREQRSQRAQEKKRQEVERLQQSLRENQLRHTKVFNEYWEDVARSKSVDHALRENRRLAGAKRASTEKLKENAERISETSQRIEVTLKNFGKIYRNKQDAKARKLEEEELRSSRHILETSVNARQRALEDELLKDLRTKRAEMHLRRVQYEKENVLSNKEFKAINSIRALNMTKEKEEELMALSNKLHTQRHILKGSQTIRDDGYLDIPDDLRKLAPPESILKCHYMDEAIDMLKGEESFKRTLRMVPVSESYASVYKSIDTEPRKKKPTKSQHVARHNSISDFSMDTPDSGRPYYQVKNSRPLRSSSNGDGLLVERRSKSLTRPRTASRSGPAALDSSRTDSTPGSSYLGGHHSGAQVASVPLRPGDASRPKKAAKRGSSKSKVSHNSMRSASDSTIETPQWSDSVSSNISSTKKKATRLRSDDANLSVSLPLPALKGPGSGLIEEEKKRNATVRQSKKERPRDSQRNKSKTDTEAAQDSLLRNQSLEIVRQLSQLTKLNKPAISNFPPPDERRELLGKLTGATQEPDYDTENRTQQIYASLSIRANEAGMDPKQFEQDVLPEHTQTRHLFASLGKSSTPNDHMDGDLILTTFSKATPEATQINDDTPKYFAPGSMTLMQESAPPSRNIGDGSTKDYVATLEYPNVKGNDGLRPAELSTYSIVLPPVSAGAGIPRVAQEPQSPQRVVNFGIDVTASDLKISSLEKVPDTSEPAFIDDSLPAEEAATAPNTRESIGYFVSSSANVHGDNTDEEN

SEQ ID NO: 119 - DNA, 1830 bp, Aspergillus fumigatus Af293
  CDS (1)..(1830)
atgtcccgacgaggacgaaaccatgactactacgaggagcacttctacgaaaaagagagcgatacatatcgacgtccgcagcggtctcgacacaagcgcttcgcccaagacgatgaatacgatgaattgaaacatggaagtcgaatgtccccgccacttcccgtggacgagttgacgcgtctacacatacaagaacggtcaaagcccgactttattcatgagagctttgatccaccgcggtaccctggccctctcgctgtgatgcgagagagggaggaaaatgagatggacatgcttccgccagagacattgaggggctacgagctggacaggcacgagcgtcgtgagcgacctcggcataggagaactgctaagggggaggatgtttattttcaggagaaatcgcaaagacagaggtatacaagggctgaatatgacgagggagaatttgagctgcaaagggaaaggccatcaataccgcgatccaacttggatagcgatgaggaacttgtacgtttacgtagcgacaagaaagggaagaaaggctcgcgcgtgaagcacgcggatcttgagattgagcgagatgagctttatcgccgtgggtctgacgccaggtgggagcacaccaggcttcacagtgatgttagagaacgcacaccagcagcacacttacgatcccaccggcaccggcagccggatggagacgaagaggatgcagaggatatcattatccaaagagatgagcggaggggtcgaagcggcaggttcaaggaaaaggaaaagattaccatgcgagaaagagaaatctcgacgtctccggagtcgccaagttcgagagagctttcgcaggtccggaagtctcatgttacatctcgtgaacgcatgagagatggttatgaactgcctcgtgcaccacttgcacccagtccagatccttcttctccaagtagcttcgaggagttggagattcgtcaccgtacacggggacgcccaaggaaggagaagattattatagaacgacgcgatgatacttcacctccatcaatactttcatcctcagaatcaggcaacaaaagcgaggacgaacttgacatcactcacgcaaatctcaagacctcaaacagaagagaggacgttttgattatggaacgtcaaccccaaccccacgagagtgatgaagaggtccatgtctttgaggaggaacagtacacccggcacgatgcgggagggcctcagcgacggagcacacctacagtcacgattgaagataaagcgatagttcgggccgattcaggaagtcatggcagtgcagaccagcagatgcgacgggagcgccgtgtatccacacagcgatcccgatccatcaagggccacagaaggctgtctgacgagaacatcgactgcaaagacggtcgaatcggacggcgatacattggcgtaaaagacaagcgagatcgactctggacagaaatcaccaaggacctggtggtcagggaggccattgagcgggccggctatgaatacgaggaaacggactcgttctattacatattctcgtatcttggatatgacgatatatcggctcttgtcgcactatcggaggacatccgccgcgcacgacgccaacgaattcaggagatcaggagggagcgaggctccatgcgtattccatttgcacctgagccagttacacccgctcccgtgttaccggggaggccgccgtctccgcgcctccggactcgggatgagcggagacttaagaaagagcgggagctcattattgaagaaggacggtggagaccaggtccagctccattgaagagatggtga

SEQ ID NO: 120 - protein, 609 aa, Aspergillus fumigatus Af293
MSRRGRNHDYYEEHFYEKESDTYRRPQRSRHKRFAQDDEYDELKHGSRMSPPLPVDELTRLHIQERSKPDFIHESFDPPRYPGPLAVMREREENEMDMLPPETLRGYELDRHERRERPRHRRTAKGEDVYFQEKSQRQRYTRAEYDEGEFELQRERPSIPRSNLDSDEELVRLRSDKKGKKGSRVKHADLEIERDELYRRGSDARWEHTRLHSDVRERTPAAHLRSHRHRQPDGDEEDAEDIIIQRDERRGRSGRFKEKEKITMREREISTSPESPSSRELSQVRKSHVTSRERMRDGYELPRAPLAPSPDPSSPSSFEELEIRHRTRGRPRKEKIIIERRDDTSPPSILSSSESGNKSEDELDITHANLKTSNRREDVLIMERQPQPHESDEEVHVFEEEQYTRHDAGGPQRRSTPTVTIEDKAIVRADSGSHGSADQQMRRERRVSTQRSRSIKGHRRLSDENIDCKDGRIGRRYIGVKDKRDRLWTEITKDLVVREAIERAGYEYEETDSFYYIFSYLGYDDISALVALSEDIRRARRQRIQEIRRERGSMRIPFAPEPVTPAPVLPGRPPSPRLRTRDERRLKKERELIIEEGRWRPGPAPLKRW

SEQ ID NO: 121 - DNA, 4221 bp, Oryctolagus cuniculus
  CDS (1)..(4221)
atgtctccacttttgaaaagcatcattgatattattgaaattttcaaccaatatgcctcacatgactgtgatggggcagtactaaagaagaaagacctaaagatccttcttgacagggaatttggagctgtccttcagagaccacatgaccctgagacggtagacgtgatgctagaacttctggatcgcgactctgatggtctggtcgggttcgatgaattctgcctacttattttcaagttggctcaagcggcttattatgcacttggccaggcctcagggttagacgaggaaaagcggtcccacggtgagggcaaggggcgcctgttacaaaatcgcaggcaagaagatcaaaggagattcgaactccgggacagacaattcgaagatgaaccagagcgacgacgctggcaaaagcaggaacaggagagggagctcgctgaggaagaggaacagaggaagaaacgagagcgattcgagcagcactacagtaggcagtaccgcgacaaggagcagcggctccaaaggcaagaactagaagagcgccgcgcagaggaagagcagctgcgaaggcgcaagggtcgcgacgcagaggagttcattgaggaagagcagctgcgaaggcgagagcagcaagagctgaagagggagctccgcgaggaggagcagcaaaggcgagagcgccgagagcagcacgagcgggcgctccaggaggaagaagagcagctgctgagacagaggcgctggcgcgaggaaccacgcgagcagcagcagctgaggcgcgagctggaagagatacgcgaacgcgagcagagacttgagcaggaggagaggcgcgagcagcagctgaggcgcgagcagagacttgagcaggaggagaggcgcgagcagcagctgaggcgcgagctggaagagatacgcgaacgcgagcagaggcttgagcaggaggagaggcgcgagcagcgacttgagcaggaggagaggcgcgagcagcagctgaagcgcgagctggaagagatacgcgaacgcgagcagaggcttgagcaggaggagaggcgcgagcagctgctggctgaggaggtgcgggaacaggcccgggagcgaggcgagagcctcacccggaggtggcagcggcagctagagagtgaggccggcgcacgtcagagcaaagtctactccaggccccgcaggcaggaagagcagagtctccgccaggaccaggagaggaggcagcgccaggaacgtgaacgggagctggaagagcaggcccgccggcagcagcagtggcaagcagaagaagagagcgagaggcgccgccagaggctgtcggccaggccctcgttgcgcgagaggcagctgagggcggaggagcgccaggagcaggaacaacggttccgggaggaggaggagcagcggcgcgagaggaggcaggagctgcagttcctcgaggaggaggagcagctccagcgacgggagcgtgcccaacagctccaggaagaggacagctttcaggaggatcgggagaggaggcgacgccaacaggagcagcgccccggccaaacatggaggtggcaactccaggaagaagcccaaagacgccgtcacacgctgtacgccaaaccggggcagcaggagcagctgagggaggaagaggagctgcaaagggagaagaggcgccaggagcgggagagagaatatcgggaggaagagaaactgcagagagaggaagacgagaagagacgacgccaggaacgcgagagacaataccgggagttagaggagctgcggcaggaagagcagctgcgtgacaggaaactccgcgaggaggagcagctccttcaagaaagggaggaagagaggctgcgccgccaggaacgcgagaggaaactccgcgaggaggagcagctgctgcgccaggaggagcaggagctccgccaggaacgcgagaggaaactccgcgaggaggagcagctgctgcgtcgggaggagcaggagctccgccaggaacgcgagaggaaactccgcgaagaggagcagctgcttcaggagagggaggaagagaggctgcgccgtcaggaacgcgccaggaaactccgtgaggaggagcagctgctgcgccaggaggagcaggagctccgccaggaacgggagaggaaactccgcgaggaggagcagctgctgagacgcgaggagcagctactgcgccaggaacgcgacaggaaactccgcgaagaggagcagctccttcaggaaagcgaggaagagaggctgcgtcgccaggaacgcgagcaacaacttcgtcgggagcgcgacagaaagttccgcgaggaggagcagctccttcaggagagggaggaagagcggctgcgccgtcaggaacgcgagaggaaactccgtgaggaggagcagctccttcaggagagggaggaagagcggctgcgccgtcaggaacgcgagaggaaactccgtgaggaggagcagctccttcaggagagggaggaagagcggctgcgccgtcaggaacgcgagaggaaactccgtgaggaggagcagctgctgcgccaggaggagcaggagctccgccaggaacgcgccaggaaactccgtgaggaggagcagctgctgcgccaggaggagcaggagctccgccaggaacgcgacaggaaactccgcgaggaggagcagctgctgcgccaggaggagcaggagctccgccaggaacgcgacaggaaactccgcgaagaggagcagctccttcaggaaagcgaggaagagaggctgcgccgtcaggaacgcgagaggaaactccgtgaagaggagcagctgctgcgtcgggaggagcaggagctccgtcgggaacgcgccaggaaactccgtgaggaggagcagctgcttcaggagagggaggaagagaggctgcgccgtcaggagcgcgccaggaaactccgtgaggaggagcagctgctgcgccgggaggagcaggagcttcgtcaggagcgcgacagaaagttccgcgaagaggagcagctgcttcaggagagggaggaagagaggctgcgccgtcaggaacgcgacagaaagttccgcgaggaagaaagacagcttcgtcgccaggaactcgaggaacagtttcgtcaggagcgcgatagaaaattccgcttagaggaacagatccgccaggagaaggaggaaaagcagctgcgccgtcaggagcgcgacaggaaattccgcgaggaggagcagcagcgacgccgccaggaacgcgagcaacaacttcgtcgggagcgcgacagaaagttccgcgaggaggagcagctccttcaggagagggaggaagagcggctgcgccgtcaggagcgcgccaggaaactccgcgaggaggagcagctgctgagacgcgaggagcagctactgcgccaggaacgcgacagaaagttccgcgaggaggagcagctgcttcaggaaagcgaggaagagaggctgcgccgccaggaacgcgagaggaaactccgcgaggaggagcagctgcttcaggaaagggaggaagagcggctgcgccgtcaggagcgcgccaggaaactccgcgaggaggagcagctgctgcgccaggaggagcaggagctccgccaggaacgcgccaggaaactccgcgaggaggagcagctgctgcgccaggaggagcaggagctccgccaggaacgcgacagaaagttccgtgaggaggagcagctgctgcgtcgggaggagcaggagctccgtcgggagcgcgacagaaagttccgcgaggaggagcagctgcttcaggaaagggaggaagagcggctgcgccgtcaggagcgcgccaggaaactccgcgaggaagaagagcaactgctgtttgaggagcaggaagagcagaggctccggcaggagcgagaccggcggtaccgagcagaggagcagtttgccagagaggagaagagccgtcgtctggaaagagagctgcgtcaagaagaagagcagagacgccgccgggaacgggagaggaaattccgggaagagcagctccgccgccagcaggaggaggagcagaggcgccgccaactgcgggagagacaattccgagaagatcagagccgtcggcaagttctggagcccggtacacgtcagtttgctagggtcccggtgcgctccagccctctttatgaatacatccaagagcagagatctcagtaccgcccc

SEQ ID NO: 122 - protein, 1407 aa, Oryctolagus cuniculus
MSPLLKSIIDIIEIFNQYASHDCDGAVLKKKDLKILLDREFGAVLQRPHDPETVDVMLELLDRDSDGLVGFDEFCLLIFKLAQAAYYALGQASGLDEEKRSHGEGKGRLLQNRRQEDQRRFELRDRQFEDEPERRRWQKQEQERELAEEEEQRKKRERFEQHYSRQYRDKEQRLQRQELEERRAEEEQLRRRKGRDAEEFIEEEQLRRREQQELKRELREEEQQRRERREQHERALQEEEEQLLRQRRWREEPREQQQLRRELEEIREREQRLEQEERREQQLRREQRLEQEERREQQLRRELEEIREREQRLEQEERREQRLEQEERREQQLKRELEEIREREQRLEQEERREQLLAEEVREQARERGESLTRRWQRQLESEAGARQSKVYSRPRRQEEQSLRQDQERRQRQERERELEEQARRQQQWQAEEESERRRQRLSARPSLRERQLRAEERQEQEQRFREEEEQRRERRQELQFLEEEEQLQRRERAQQLQEEDSFQEDRERRRRQQEQRPGQTWRWQLQEEAQRRRHTLYAKPGQQEQLREEEELQREKRRQEREREYREEEKLQREEDEKRRRQERERQYRELEELRQEEQLRDRKLREEEQLLQEREEERLRRQERERKLREEEQLLRQEEQELRQERERKLREEEQLLRREEQELRQERERKLREEEQLLQEREEERLRRQERARKLREEEQLLRQEEQELRQERERKLREEEQLLRREEQLLRQERDRKLREEEQLLQESEEERLRRQEREQQLRRERDRKFREEEQLLQEREEERLRRQERERKLREEEQLLQEREEERLRRQERERKLREEEQLLQEREEERLRRQERERKLREEEQLLRQEEQELRQERARKLREEEQLLRQEEQELRQERDRKLREEEQLLRQEEQELRQERDRKLREEEQLLQESEEERLRRQERERKLREEEQLLRREEQELRRERARKLREEEQLLQEREEERLRRQERARKLREEEQLLRREEQELRQERDRKFREEEQLLQEREEERLRRQERDRKFREEERQLRRQELEEQFRQERDRKFRLEEQIRQEKEEKQLRRQERDRKFREEEQQRRRQEREQQLRRERDRKFREEEQLLQEREEERLRRQERARKLREEEQLLRREEQLLRQERDRKFREEEQLLQESEEERLRRQERERKLREEEQLLQEREEERLRRQERARKLREEEQLLRQEEQELRQERARKLREEEQLLRQEEQELRQERDRKFREEEQLLRREEQELRRERDRKFREEEQLLQEREEERLRRQERARKLREEEEQLLFEEQEEQRLRQERDRRYRAEEQFAREEKSRRLERELRQEEEQRRRRERERKFREEQLRRQQEEEQRRRQLRERQFREDQSRRQVLEPGTRQFARVPVRSSPLYEYIQEQRSQYRP

SEQ ID NO: 123 - DNA, 2025 bp, Pan troglodytes
  CDS (1)..(2025)
atggaggtgaaggacacaggatcagccaaatcccctgtccagcaaggagaaggacacaggatcagccaaaccccctctccacggagacaaaggacacagaatcagccacatcccctctccacggaggcgaaggacacaggatcagccaaaccccctttccatggaggtgaaggacacagaatcagccaaaccccctctccaccaaggagaaggacacaggatcagccaaaccccctcaccacggaggcgaaggacacaggatcagccaaaccccctctccaccaaggagaaggacacagaatcagccacatcccctctccatggaggcgaaggacacagaatcagccaaaccccctctccacggaggcgaaggacacaggatcagccaaatcccctctccagcaaggagaaggacacaggatcagccaaaccccctctccacggagacaaaggacacagaatcagccacatcccctctccacggaggcgaaggacacagaatcagccaaactccctctccatggaggtgaaggagctgctgcaactgacggagggaccgtccaattgcttggagggctgctcagaggagacacccagcagaaactatgtcagaggctgctcagagaagacacccagcagacactatgtcagaggctgctaagaggagacacccagcagacgctatgtcagaggctgctcagaggagacacccagcagacactatgtcagaggctgctcagtgaagagactcagcagacactatgtcagaggctgctcagagaagggacccagcagacactatgtcagaggctgctcagagaagggacccagcagacactatgtcagaggctgctcagagaagacacccagcagacactctgtcagaggctgctcagagaagacacccagcagacactatgtgagaggctgctcagagaagggacccagcagacgctatgtcataggttgctcagagaagggacccagcagacactatgtcagaggctgttcagaggagacacccagcagacactatgtcagaggctgctcagaggagacacccagcagacactatgtgagaggctgctcagagaagagacccagcagacacgatgtcagaggctgctcagtgaagagacccagcagacacgatgtcagaggctgctcagagaagacacccagcagacactatgtgagaggctgctcagagaagggacccagcagacacgatgtcagaggctgctcagagaagggacccagcagacacgatgtcagaggctgctcagaggagacacccagcagacactatgtcagaggctgcttagagaagggacccagcagacgctatgtgataggttgctcagagaagacgcccagcagaccctatgtcaaaggctgctcagtagagagagacccagaagacactatgtcagaggctgcttagagaagggacccagcagacgctatgtcagaggctgctcagaggagacacccagcagacgctatgtcagaggctgctcagaagagacacgaggcagacgctataggctgctcagtgaagagactcagcagacactatgtcagaggctgctcagagaagggacccagcagacactatgtcagaggctgctcagagaagggacccagcagacactatgtcagaggctgctcagagaagggacccagcagacactatgtcagaggctgctcagagaagacacccagcagacactctgtcagaggctgctcagagaagacacccagcagacactatgtgagaggctgctcagagaagggacccagcagacgctatgtcataggttgctcagagaagacgcccagcagacactatgtcaaaggctgctcagagaagagacccagaagacactaagtcagaggctgcttagagaagggacccagcagacgctacgtcagaggctgctcagaggagacacccagcagacgctatgtcagaggctgctcagaggagacacccagcagacactatgtcagaggctgctctag

SEQ ID NO: 124 - protein, 674 aa, Pan troglodytes
MEVKDTGSAKSPVQQGEGHRISQTPSPRRQRTQNQPHPLSTEAKDTGSAKPPFHGGEGHRISQTPSPPRRRTQDQPNPLTTEAKDTGSAKPPLHQGEGHRISHIPSPWRRRTQNQPNPLSTEAKDTGSAKSPLQQGEGHRISQTPSPRRQRTQNQPHPLSTEAKDTESAKLPLHGGEGAAATDGGTVQLLGGLLRGDTQQKLCQRLLREDTQQTLCQRLLRGDTQQTLCQRLLRGDTQQTLCQRLLSEETQQTLCQRLLREGTQQTLCQRLLREGTQQTLCQRLLREDTQQTLCQRLLREDTQQTLCERLLREGTQQTLCHRLLREGTQQTLCQRLFRGDTQQTLCQRLLRGDTQQTLCERLLREETQQTRCQRLLSEETQQTRCQRLLREDTQQTLCERLLREGTQQTRCQRLLREGTQQTRCQRLLRGDTQQTLCQRLLREGTQQTLCDRLLREDAQQTLCQRLLSRERPRRHYVRGCLEKGPSRRYVRGCSEETPSRRYVRGCSEETRGRRYRLLSEETQQTLCQRLLREGTQQTLCQRLLREGTQQTLCQRLLREGTQQTLCQRLLREDTQQTLCQRLLREDTQQTLCERLLREGTQQTLCHRLLREDAQQTLCQRLLREETQKTLSQRLLREGTQQTLRQRLLRGDTQQTLCQRLLRGDTQQTLCQRLL

SEQ ID NO: 125 - DNA, 5694 bp, Homo sapiens
  CDS (1)..(5694)
atgtctccacttctgagaagcatctgtgacatcactgaaattttcaatcagtatgtctctcatgattgtgatggagcagcattaactaagaaagacctgaagaacctccttgaaagggaatttggagctgtgcttcggagaccacatgaccctaagacggtagatctgatcctggaacttctggatcgtgacagtaatgggcgtgtcgatttcaacgaattcctcctatttattttcaaagtggctcaagcttgttactatgctctcggccaggccacgggactggatgaggagaagcgagcccggtgtgacggaaaggagagcctgttacaagatcgacggacagaagaagaccaaaggagattcgagccccgggacagacaactggaagaagaacctgggcaacgacgcaggcagaagaggcaggaacaggagagggagctagctgagggagaggagcaaagtgagaaacaagagcgacttgaacagcgcgacaggcagcgccgcgacgaggagctgtggcggcaaaggcaagaatggcaagaacgggaagagcgccgtgcagaggaagagcagctgcagagttgcaaaggtcacgaaactgaggagtttccagacgaagagcaactgcgaaggcgggagctgctggagctgaggaggaagggccgcgaggagaaacagcagcaaaggcgagagcgccaagacagagtgttccaggaggaagaagagaaagagtggaggaagcgcgagacagtgctccggaaggaagaagagaagttgcaggaagaggagccgcagcggcaaagagagctccaggaggaagaagagcagctacggaagctggagcggcaagagctgaggagggagcgccaggaggaagagcagcagcagcaaaggctgaggcgcgagcagcaactaaggcgcaagcaggaggaggagaggcgcgagcagcaggaggagaggcgcgagcagcaggagaggcgcgagcagcaggaggagaggcgcgagcagcagctgaggcgcgagcaggaggagaggcgcgagcagcagctgaggcgcgagcaggaggaggagaggcgcgagcagcagctgaggcgcgagcaggaggaggagaggcgcgagcagcagctgaggcgcgagcaggaggaggagaggcgcgagcagcagctgaggcgcgagcagcagctgaggcgcgagcagcagctgaggcgcgagcagcagctgaggcgcgagcagcagctgaggcgcgagcagcagctgaggcgcgagcagcagctgaggcgcgagcagcagctgaggcgcgagcagcagctgaggcgcgagcagcagctgaggcgcgagcaggaggaggagaggcacgagcagaagcacgagcaggagaggcgcgagcagcggctgaagcgcgagcaggaggagaggcgcgattggctgaagcgcgaggaggagacggagaggcacgagcaggagaggcgcaagcagcagctgaagcgcgaccaggaggaggagaggcgcgaacgttggctgaagctcgaggaggaggagaggcgcgagcagcaggagaggcgcgagcagcaactaaggcgggagcaagaggagaggcgcgagcagcggctgaagcgccaggaggaggaagagaggctccagcagcggttgaggagcgagcaacaactaagacgcgagcaggaggagaggctcgagcagctgctgaagcgcgaggaggagaagaggctcgagcaggagaggcgagagcagcggctgaagcgcgagcaggaggagaggcgcgatcagctgctgaagcgcgaggaggagaggcgccagcagcggctgaagcgcgagcaggaagagaggctcgagcagcgactgaagcgcgaggaggtggagagactcgagcaggaggagaggcgcgacgagcggctgaagcgcgaggagccggaggaagagaggcgccacgagctgctgaagagcgaggagcaggaggagaggcgccacgagcaactgaggcgcgagcagcaggaaaggcgcgagcagcggctgaagcgcgaggaggaggaagagaggctcgagcagcggctgaagcgcgagcatgaggaagagaggcgcgagcaggagctagctgaggaggagcaggaacaggcccgggagcggattaagagccgcatcccgaagtggcagtggcagctagaaagcgaggccgacgcacggcaaagcaaagtcttactcgaggccccgcaagcaggaagggcagaggcgccgcaagagcaggaggaaaagaggcggcgcgagagtgagctgcaatggcaggaggaggaacgggctcaccggcagcagcaggaagaggagcagcgccgggacttcacatggcagtggcaggcggaggaaaagagcgagaggggccgtcagaggctgtcggccaggcccccattgcgggagcagcgggagaggcagctgagggccgaggagcgccagcagcgggaacaacggtttctcccggaggaggaggagaaggagcagcgcggccgccagcgacgcgagagggagaaagagctgcagttcctggaggaagaggagcagctccagcggcgggagcgtgcccaacagctccaggaggaggaggacggcctccaggaggatcaggagaggaggcgacaggagcagcgccgcgaccaaaaatggaggtggcaactagaagaagaaaggaagagacgccgccacacgctgtacgccaagccagccctacaagagcagctgaggaaggaacagcagctgctgcaggaggaggaggaggagctacagagagaggagcgcgagaagagaaggcgccaagaacaggagagacaataccgcgaggaagagcagctgcagcaggaggaagagcagctgctgagagaggaacgggagaaaagaagacgccaggagcgggaaaggcaatatcggaaggataagaagctgcagcagaaggaagagcagctgctgggagaggaaccggagaagagaaggcgccaggagcgggagaaaaaataccgcgaggaagaggagttgcagcaggaggaagagcagctgctgagagaggaacgggagaagagaaggcgccaggagtgggagaggcagtaccgcaaaaaagacgagctgcagcaggaagaagagcagctgctgagagaggaacgggagaaaagaagactccaggagcgggagaggcaatatcgggaggaagaggagctgcagcaggaggaagagcagctgctgggagaggaacgggagacgagaaggcgccaggagctggagaggcaatatcggaaggaagaggagctgcagcaggaggaagagcagctgctgagagaggaaccggagaagagaaggcgccaggagcgggagaggcaatgtcgggaggaagaggagctgcagcaggaggaagagcagctgctgagagaggaacgggagaagagaaggcgccaggagctggagaggcaatatcgggaggaggaagagcttcagcgccagaaaaggaaacagcgataccgggatgaggatcagcgcagtgatctgaaatggcagtgggaaccagaaaaagaaaatgcagttcgtgataacaaggtttactgcaaaggcagagagaatgaacagttccggcagttggaagattcccaggtgcgcgacagacaatcccagcaagatctgcagcacctgctgggtgaacagcaagagagagatcgtgagcaagagaggaggcgctggcagcaggccaacaggcatttcccagaggaagaacagctggagcgagaagagcaaaaggaagccaaaaggcgcgacaggaagtcccaagaggaaaagcagttgctgagagaggaaagagaagagaagagacgccgtcaagagacagacagaaaattccgcgaggaggaacagctgctccaggaaagggaggaacagccgctgctccgccaagagcgtgacagaaaattccgcgaagaggaactgctccatcaggaacaagggagaaaattcctcgaggaggaacagcggctgcgcgaggaacgggagagaaaattccttaaggaggaacagcagctgcgcctcgaggagcgcgagcaactgcgtcaggaccgcgacagaaaattccgcgaggaggaacagcagctgagccgccaagagcgtgacagaaaattccgtgaagaggaacagcaggtgcgccgccaggaacgagagagaaaattcctggaggaggaacagcagctgcgccaggagcgtcacagaaaattccgcgaagaggaacagctgctccaggaaagggaagaacagcagctgcaccgccaagagcgtgacagaaaattcctggaggaggaacaacagctgcgccgccaagagcgtgacagaaaattccgcgaacaggaactgcgcagtcaggaaccagagagaaaattcctcgaggaggaacagcagctgcaccgccagcaacggcagagaaaattcctccaggaggaacagcagctgcgccgccaggagcgcgggcaacagcggcgtcaggaccgtgacagaaaattccgcgaggaggaacagctgcgccaggagagggaggaacagcagctgagccgccaagagcgtgacagaaaattccgtttagaggaacagaaagtgcgccgccaggaacaagagagaaaattcatggaggacgaacagcagctgcgccgccaggagggccaacaacagctgcgccaggaggacagaaaattccgcgaagacgaacagctgctccaggaaagggaagaacagcagctgcaccgccaagagcgtgacagaaaattcctcgaggaggaaccgcagctgcgccgccaggagcgcgaacaacagctgcgtcacgaccgcgacagaaaattccgtgaagaggaacagctgctccaggaaggggaggaacagcagctgcgccgccaagagcgtgacagaaaattccgcgaagaggaacagcagctccgccgtcaggaacgagagagaaaattcctccaggaggaacagcagctgcgccgccaggaactggagagaaaattccgtgaggaggaacagctgcgccaagaaacggagcaagagcagctgcgccgccaagaacgctacagaaaaatcctagaggaagagcagctccgtccggaaagggaagaacagcagctgcgccgccaggagcgcgacagaaaattccgcgaggaggaacagctccgccagggaagggaggaacagcagctgcgcagccaagagtctgacagaaaattccgcgaggaggaacagctacgccaggagagggaagaacagcagctccgcccccaacagcgtgacggaaagtatcgctgggaagaagagcagctccaacttgaggaacaagagcagaggctgcggcaggagcgagaccggcagtaccgggcggaggagcagtttgccacgcaggagaagagtcgtcgtgaggaacaagaactatggcaagaagaggagcagaaacgtcgccaggaacgggaaaggaaattacgggaagaacacatccgccgccagcagaaggaggaacagaggcaccgccaagtcggggagatacaatcccaagaagggaagggccatgggcggcttctggagcccggcactcatcagtttgccagtgtcccagtgcgctccagccctctctatgagtacatccaagagcagagatctcaataccgccct

SEQ ID NO: 126 - protein, 1898 aa, Homo sapiens
MSPLLRSICDITEIFNQYVSHDCDGAALTKKDLKNLLEREFGAVLRRPHDPKTVDLILELLDRDSNGRVDFNEFLLFIFKVAQACYYALGQATGLDEEKRARCDGKESLLQDRRTEEDQRRFEPRDRQLEEEPGQRRRQKRQEQERELAEGEEQSEKQERLEQRDRQRRDEELWRQRQEWQEREERRAEEEQLQSCKGHETEEFPDEEQLRRRELLELRRKGREEKQQQRRERQDRVFQEEEEKEWRKRETVLRKEEEKLQEEEPQRQRELQEEEEQLRKLERQELRRERQEEEQQQQRLRREQQLRRKQEEERREQQEERREQQERREQQEERREQQLRREQEERREQQLRREQEEERREQQLRREQEEERREQQLRREQEEERREQQLRREQQLRREQQLRREQQLRREQQLRREQQLRREQQLRREQQLRREQQLRREQQLRREQEEERHEQKHEQERREQRLKREQEERRDWLKREEETERHEQERRKQQLKRDQEEERRERWLKLEEEERREQQERREQQLRREQEERREQRLKRQEEEERLQQRLRSEQQLRREQEERLEQLLKREEEKRLEQERREQRLKREQEERRDQLLKREEERRQQRLKREQEERLEQRLKREEVERLEQEERRDERLKREEPEEERRHELLKSEEQEERRHEQLRREQQERREQRLKREEEEERLEQRLKREHEEERREQELAEEEQEQARERIKSRIPKWQWQLESEADARQSKVLLEAPQAGRAEAPQEQEEKRRRESELQWQEEERAHRQQQEEEQRRDFTWQWQAEEKSERGRQRLSARPPLREQRERQLRAEERQQREQRFLPEEEEKEQRGRQRREREKELQFLEEEEQLQRRERAQQLQEEEDGLQEDQERRRQEQRRDQKWRWQLEEERKRRRHTLYAKPALQEQLRKEQQLLQEEEEELQREEREKRRRQEQERQYREEEQLQQEEEQLLREEREKRRRQERERQYRKDKKLQQKEEQLLGEEPEKRRRQEREKKYREEEELQQEEEQLLREEREKRRRQEWERQYRKKDELQQEEEQLLREEREKRRLQERERQYREEEELQQEEEQLLGEERETRRRQELERQYRKEEELQQEEEQLLREEPEKRRRQERERQCREEEELQQEEEQLLREEREKRRRQELERQYREEEELQRQKRKQRYRDEDQRSDLKWQWEPEKENAVRDNKVYCKGRENEQFRQLEDSQVRDRQSQQDLQHLLGEQQERDREQERRRWQQANRHFPEEEQLEREEQKEAKRRDRKSQEEKQLLREEREEKRRRQETDRKFREEEQLLQEREEQPLLRQERDRKFREEELLHQEQGRKFLEEEQRLREERERKFLKEEQQLRLEEREQLRQDRDRKFREEEQQLSRQERDRKFREEEQQVRRQERERKFLEEEQQLRQERHRKFREEEQLLQEREEQQLHRQERDRKFLEEEQQLRRQERDRKFREQELRSQEPERKFLEEEQQLHRQQRQRKFLQEEQQLRRQERGQQRRQDRDRKFREEEQLRQEREEQQLSRQERDRKFRLEEQKVRRQEQERKFMEDEQQLRRQEGQQQLRQEDRKFREDEQLLQEREEQQLHRQERDRKFLEEEPQLRRQEREQQLRHDRDRKFREEEQLLQEGEEQQLRRQERDRKFREEEQQLRRQERERKFLQEEQQLRRQELERKFREEEQLRQETEQEQLRRQERYRKILEEEQLRPEREEQQLRRQERDRKFREEEQLRQGREEQQLRSQESDRKFREEEQLRQEREEQQLRPQQRDGKYRWEEEQLQLEEQEQRLRQERDRQYRAEEQFATQEKSRREEQELWQEEEQKRRQERERKLREEHIRRQQKEEQRHRQVGEIQSQEGKGHGRLLEPGTHQFASVPVRSSPLYEYIQEQRSQYRP

SEQ ID NO: 127 - DNA, 717 bp, Mus musculus
  CDS (1)..(717)
atgagttcttaccagcaaaagcagccctttgtcccacctcctcagcctgaacagcatcaagtgaagcaaccttgtcagcctccaccacaaggaaaatttgttcccatagccacctctgagccatgccacacagatgttccacaaccaggaaacaccaagattccagaaccatgcagcaccaaagtgcctgagccagggaacactgttgttcttgagccagattatactacgatgcctgggccatgttctacaaacatcactgagccagattataccacaattcctggaccatgctctaccaacatcacagagccagattatactacaattcctgggccatgctctaccaacatccctgggccagatcgtaccgtggttcctggatcatgctctaccaacatcacagagccagattataccacaattcctgggccatcctctaccaaaatccctgacccaggctgtgccatggttcctgggcccagtccttccagtacttctgagccaagctcagaaccatgctctatcaatgttcgtgaacctggctacatgaatgcctcagagcccacccatgccaaggttcctgatcagggctacaccaagatacctgaccagggatcctctaaggtaccagagccatgccagtccagggttcctgaggtgtgccccccaactgtcacccctgtatcagctaagcagaagaccaagcagaagtaa

SEQ ID NO: 128 - protein, 238 aa, Mus musculus
MSSYQQKQPFVPPPQPEQHQVKQPCQPPPQGKFVPIATSEPCHTDVPQPGNTKIPEPCSTKVPEPGNTVVLEPDYTTMPGPCSTNITEPDYTTIPGPCSTNITEPDYTTIPGPCSTNIPGPDRTVVPGSCSTNITEPDYTTIPGPSSTKIPDPGCAMVPGPSPSSTSEPSSEPCSINVREPGYMNASEPTHAKVPDQGYTKIPDQGSSKVPEPCQSRVPEVCPPTVTPVSAKQKTKQK

SEQ ID NO: 129 - DNA, 216 bp, Homo sapiens
  CDS (1)..(216)
atgtcttatcaacagcagcagtgcaagcagccctgccagccacctcctgtgtgccccacgccaaagtgcccagagccatgtccacccccgaagtgccctgagccctgcccaccaccaaagtgtccacagccctgcccacctcagcagtgccagcagaaatatcctcctgtgacaccttccccaccctgccagccaaagtatccaccgaagagcaag

SEQ ID NO: 130 - protein, 72 aa, Homo sapiens
MSYQQQQCKQPCQPPPVCPTPKCPEPCPPPKCPEPCPPPKCPQPCPPQQCQQKYPPVTPSPPCQPKYPPKSK

SEQ ID NO: 131 - DNA, 4797 bp, Mus musculus
  CDS (1)..(4797)
atgtctccacttataagaagcattgtcgatatcactgaagttttcaatcaatatgcatcacaaagttgtgatggagcatcacttagcaagaaagacctgaaaaacctccttgagagagaacttggagatgtccttcagagaccacatgaccctgagacgatagacctgaccctagaacttctggatcgcgactgcaacgggcgtgttgatttcaacgaattcctcctgttccttttcaagattgctcaagcttgctattatgctctcgatcaggccgcagagctaggcgagaagagagccctgcccaatgaaaagaggaacctgtcacaagatcgcaggcaagaagaccaaaggagattcgagccccgaagcagacaactggacgaagaacctgggcgccgaagctggcagaagagacgtgagcaggaggagcgcgctgaggagcagcggctggagcagcgctacaggcagcaccgcgatgaagagcagagactgcaaaggcgagaactgcaagaactggaggaacgccttgcagagaaagagccgcttggctggagtaagggtcgtgacgcggaggagttttctgaggtagaggaacagcaaaggcaagagaggcaggaactcaagggcaagggccaaacagaagagagaaggctgcagaagcgcaggcaagaagagctacgcgaacccctgctaaggcgcgatctggagttgaggcgcgaacaagagctaaggcgcgagcaggagttgaggcaggaacagaggcgcgagcaggagctaaggcgcgagcaggagctgaggcaagagctgaggcgcgagcaggagctgaatcgaaggcaggagctgaggcgcgaacaagagctaaggcgcgagcaggagctgaggcaggagctgaggcgcgagcaggagctaaggcgcgagcaggagttgaggcaggaactgaggcgcgagcaagagctaaggcgcgagcaggagttgaggcaggaactgaggcgcgagcaagagctaaggcgcgagcaggagttgaggcaggaactgaggcgtgagcaagagctaagacgcgagcaagagctgaggcaggagctggctgaggaggacgagctgacgcggatccgggaacccgacgagagcattacccagaggtggcagtggcagctcgaaaacgaggcagacgcccgtcagaacaaggtctactctaggcctagcaggcaggagcagaggcttcgccaggagctgggggagcgtcagctccgggagcaggaggagcagcgccgcgacctccaacaggagcgtcccgctgaggaggcgcgccagcgcaaccagtgggagaggccgcagcgggcggaggagcgcctggagcaggagcagcggttccgcgacagggaggagcagcgcttccgggaggagaagctgcaacgagcagagctccaggacagcctcctagatgaagaacagaggcgactccaggaggaacgccgagagccaaacaggagccggcaactgagggaagaaagccagaggcgccgcacactgtacgccaaacccagccagaggcagcgtagggaggaggagctacgcgaggaacggctgttgcaagaagagcagcgccagcagcgggagaggaaacaccgcagggaggaggatctgcagcaggaggaaaagcggctgcagcaagacgaagagcaactgcagcgagaaaggaggcgcctgcagcgggagaggcagtatcaggaggaggacctgcaacaggaggaagagcggctgcagcaggaggaagagcggctgcagagagaaagaaggcgcctgcagcaggaaaggcagtatcaggaggaggacctgcagcggctgcgggatgaagatcagcgcagggatctgaaatggcagtggcaaccaaggaaagaaaatgaagttcgtagtaacaggctcttcaccaaacgcagaggggatgaggaacccatccagcagctggaagattctcaggagcgagagagacgtcaggatcggcggcctctgcaagacgaagaggaagagaagagagagctggagcaggagaggaggcgtcgacagcagcgcgaccgtcagatcctagaggaagagcagtttcagcgagagcaccaacgggaagccagaagacgagatgagacgttccaggaggaagaacagctccagggagaatcgagaagacggcaacaggagagagagggcaagttccttgaggaggaaaggcagctgcggacagaacgggaagagcagaggcggcgtcaagaacaagagagagaattccaagaggaggaggagcacctccaagaacgcgagaaagaacttcggcaggaatgcgacagaaaatctcgtgaacaagagcgccgccagcagcgtgaggaagagcagctgaggcgtcaggagcgggaccagagattccgtcgggaacaagaacgccacctggaacgtgaggaagagcagctgcgggacagaccatcccgccgggaacaagaacgccaccaggaacgtgaggaagagcagctgcgggacagaccatcccgccgggaacaagaacgccaccaggaacgtgaggaagagcagctgcgggacagaccatcccgccgggaacaagaacgccaccaggaacgtgaggaagagcagctgcgggacagaccattccgccgggaacaagaacgccgcctggagcgtgaggaagagcagctgcgggacagaccatcccgccgggaacaagaacgccaccaggaacgtgaggaagagcagctgcgggacagaccatcccgccgggaacaagaacgccgcctggagcgtgaggaagagcagctgcgggacagatcattccgccgggagcaagagctcagacgggacagaaaattccatgaggaagaagagcgccgcgaggaactggaggaagagcagcgtggccaagagcgggaccgtttgagggtggaggagcagcttcgcggacagcgagaggaagagcagcgccgccgccaggaatgtgacagaaaattacaccgggaactagaggtccgccaggaactggaggaagagcggctgcgggacagaaagctccgcagggaacaagagctcaggcgcgacagaaaattccatgaggaagaagagcgccgtcatgaggagttcgaggaaaagcagctgcgcctccaggaaccggacagaagattccgccgggaacaagagctccgtcaggaatgcgtcgaggaagagcggctgcgggacagtaagatccgccgggagcaagagctccgccgggagcgcgaagaagagcggctgagggacagaaagatccgccgggaccaagaactccgccagggactggaggaagagcagctgaggcgccaggaacttgacagaaaattccgtgaggaacaagagctcgaccaagaactggaggaagagcggctgcgggacagaaagatccgccgggagcaagagctccgccgggagcaagagctccgccgggagcaagagttccgccgggagcaagagctccgccgggagcaagagttccgccgggagcaagagctccgccaggagcgcgaggaagagcggctgagggacagaaagatccgccgggaccaagaactccgccagggactggaggaagagcagctgaggcgccaggaacgtgacagaaaagtccgtgaggaacaagagctcgaccaagaactggaggaagagcggctgcgggacagaaagatccgccgggagcaagagctccgcagagagcaagagctccgccgggagcaagagttccgccgggagcaagggctccgccgggagcgcgaggaagagcggctgagggacagaaagatccgccgggaccaagaactccgccagggactggaggaagagcagctgaggcgccaggaacgtgacagaaaattccgtgaggaacaagagctcggccaagaactggaggaagagcggctgcgggacagaaagatccgccgggagcaagagctccgccgggaacgcgagcaagagcagcggcgccgcctggagcgtgaggaagagcagcagcgtctccatgagcgtgaggaagagcagcggcgccgccaggagcgcgagcaagagcagcagcggtgcctggagcgtgaggaggaacaatttcgctttgaggagcagcagcgccgccgccaggaacgcgagcaacagttgagacaggagcgcgacagaagagtccttgaggaagaagagcttcgtcaggaaagggaggagctgctgcaccgccaggtgggtggcaggaaattccgggaagaggagcgactccgcctggaaagagaggaacagcagcgtcgtctccaggagcgtgacaacagaagattccgcgaggaagtagagctcaggcaagaaagggaagggcagcagcttcgccaagagcgtgacagaaaattccgtgaggtagaagagcttcgccaggaagaacagcgccgccgccaggagcgtgacaggaaattccgggaagagaaacacccacgcgaggaacgcgaggaacagcagttgcgcagggagaagcgagatggtcaatacctggctgaggagcagtttgccagggatacgattcgtcgccaggaacaagaactacgtcaagaagaggaacaaagacgtcgccaagagcgggagagaaaattccaagaagagcaaatccgtcgtaggcaagaggagcagaggcgccgccaaatcctggagcctggtacacgccagtttgccaatgtcccagtgcgttccagccctctctatgagtacatccaggagcagaggtctcaataccgccct

SEQ ID NO: 132 - protein, 1599 aa, Mus musculus
MSPLIRSIVDITEVFNQYASQSCDGASLSKKDLKNLLERELGDVLQRPHDPETIDLTLELLDRDCNGRVDFNEFLLFLFKIAQACYYALDQAAELGEKRALPNEKRNLSQDRRQEDQRRFEPRSRQLDEEPGRRSWQKRREQEERAEEQRLEQRYRQHRDEEQRLQRRELQELEERLAEKEPLGWSKGRDAEEFSEVEEQQRQERQELKGKGQTEERRLQKRRQEELREPLLRRDLELRREQELRREQELRQEQRREQELRREQELRQELRREQELNRRQELRREQELRREQELRQELRREQELRREQELRQELRREQELRREQELRQELRREQELRREQELRQELRREQELRREQELRQELAEEDELTRIREPDESITQRWQWQLENEADARQNKVYSRPSRQEQRLRQELGERQLREQEEQRRDLQQERPAEEARQRNQWERPQRAEERLEQEQRFRDREEQRFREEKLQRAELQDSLLDEEQRRLQEERREPNRSRQLREESQRRRTLYAKPSQRQRREEELREERLLQEEQRQQRERKHRREEDLQQEEKRLQQDEEQLQRERRRLQRERQYQEEDLQQEEERLQQEEERLQRERRRLQQERQYQEEDLQRLRDEDQRRDLKWQWQPRKENEVRSNRLFTKRRGDEEPIQQLEDSQERERRQDRRPLQDEEEEKRELEQERRRRQQRDRQILEEEQFQREHQREARRRDETFQEEEQLQGESRRRQQEREGKFLEEERQLRTEREEQRRRQEQEREFQEEEEHLQEREKELRQECDRKSREQERRQQREEEQLRRQERDQRFRREQERHLEREEEQLRDRPSRREQERHQEREEEQLRDRPSRREQERHQEREEEQLRDRPSRREQERHQEREEEQLRDRPFRREQERRLEREEEQLRDRPSRREQERHQEREEEQLRDRPSRREQERRLEREEEQLRDRSFRREQELRRDRKFHEEEERREELEEEQRGQERDRLRVEEQLRGQREEEQRRRQECDRKLHRELEVRQELEEERLRDRKLRREQELRRDRKFHEEEERRHEEFEEKQLRLQEPDRRFRREQELRQECVEEERLRDSKIRREQELRREREEERLRDRKIRRDQELRQGLEEEQLRRQELDRKFREEQELDQELEEERLRDRKIRREQELRREQELRREQEFRREQELRREQEFRREQELRQEREEERLRDRKIRRDQELRQGLEEEQLRRQERDRKVREEQELDQELEEERLRDRKIRREQELRREQELRREQEFRREQGLRREREEERLRDRKIRRDQELRQGLEEEQLRRQERDRKFREEQELGQELEEERLRDRKIRREQELRREREQEQRRRLEREEEQQRLHEREEEQRRRQEREQEQQRCLEREEEQFRFEEQQRRRQEREQQLRQERDRRVLEEEELRQEREELLHRQVGGRKFREEERLRLEREEQQRRLQERDNRRFREEVELRQEREGQQLRQERDRKFREVEELRQEEQRRRQERDRKFREEKHPREEREEQQLRREKRDGQYLAEEQFARDTIRRQEQELRQEEEQRRRQERERKFQEEQIRRRQEEQRRRQILEPGTRQFANVPVRSSPLYEYIQEQRSQYRP

SEQ ID NO: 133 - DNA, 15270 bp, Homo sapiens
  CDS (1)..(15270)
atgagtggccacaccttgcctcctcttcccgtcccaggcaccaacagcacagagcaggccagtgtacccagagccatggcagccacgctgggagccggcacgccccccaggccccaggccaggagcatagctggggtgtatgtggaggcctcgggccaggcccagagtgtctacgccgccatggagcagggcctcctgcctgctgggctcgggcaggctctgctagaggcccaggcagccactgggggcctggtggacctcgcccggggccagctgctccctgtgtccaaggccctgcagcagggtctggtggggctggagctgaaggagaagctgctggccgctgagcgtgccactacgggctatcctgacccctacggcggtgagaagctggccctctttcaggccatcgggaaggaggttgtggacagggccctggggcagagctggctggaggtccaactggccactgggggcctggtggaccccgcccagggagtgctcgtggcccctgagccagcctgccaccagggcctcctggaccgggagacatggcacaagctgtcagagcttgagcctggcacaggtgacctgcgcttcctcaaccccaacacgctggagcggctgacataccaccagctgctggaaaggtgtgtgcgtgcccccgggtcggggctagccttgctgcccctcaagatcaccttccgctccatgggcggggcggtgagtgcagctgagctgctggaggtgggcatcctggacgagcaggctgtgcagggtctgcgggagggcaggctggccgcagtggacgtgagtgcacgtgccgaggtgcggcgctacctggagggtaccggcagcgtggccggggttgtcctgctgcccgaaggccacaagaagagctttttccaggctgccaccgagcacctgctcccaatgggcaccgcgctgccactcctagaggcccaggctgccacccacaccctggtggaccccatcacaggccagcggctgtgggtagacgaggcagtcagggcgggcctggtcagcccagagctccatgagcagctcctggtggctgagcaggccgtgacagggcaccacgaccccttcagtggctcccaaatcccccttttccaggccatgaagaaggggctagtggacaggccactagcactgcggctcttggatgcccagctggccacaggcgggctggtctgtccagcacgcaggctccggctgcccctggaggccgccctgcgctgcggctgcctggatgaagacactcagcggcagctctcgcaggctggcagcttctcagacggcacgcacggcggcctgcgctatgaacagctgctggccctctgtgtcaccgacccagagaccgggcttgccttcctgccactctcagggggaccccggggaggggagccccagggacccccattcatcaagtacagcactcggcaggccctgagcacggccacagccaccgtctctgtggggaagttccggggccggcccgtgtccctctgggagctgctcttctctgaggccatctcctcagagcagagggcgatgctggcccagcagtaccaggaagggaccctctccgtggagaagctggccgctgagctgagcgccacccttgagcaggctgcagccactgccagggtcaccttttctgggctgagggacaccgtgacaccaggagagctgctgaaagccgagatcatcgaccaggacctgtacgagcggttggagcatggacaggccacagccaaggatgtgggcagcctggcctcggcgcagaggtacctgcagggtacgggctgcattgctggcctgctgctccctggctcccaggaacgcctgagcatctatgaggcccgatgcaaggggctcctccggcccggcactgccctcatccttctggaggcacaagctgccacaggcttcatcatcgacccaaaagcaaacaaggggcactccgttgaggaggcactgagggctgctgtcattgggcctgatgtgttcgcgaagctgctgtcggctgagcgcgctgtcactggctacactgacccctacaccgggcagcagatctccctcttccaggccatgcagaagggcctcatcgtccgggagcacggcatccgcctgctggaggcccagatcgccacgggcggcgtcatcgaccccgtgcacagccaccgcgtgcccgtggacgtggcctaccggcgcggctacttcgatcagatgctgaacttgatcctgttggacccttctgacgacaccaagggcttcttcgaccccaacacgcacgagaacctcacgtacctgcagcttctggagcgctgtgtgcgtgaccccgagacgggcctgtacctcctgccactcagcagcacgcagtccccgctggtggacagtgccacccagcaggccttccagaacctgctgctctccgtgaagtatggacggtttcaggggcagagggtctccgcgtgggagctgatcaactctgagtacttcagcgagggccgcaggaggcagctgctgcgtcgctaccggcagcgcgaggtcacgctggggcaggtggcaaagctgctggaggcggagacgcagagacaggcggacatcatgctgcccgcactgcggagccgggtcaccgtccaccagctcctggaggccggtatcattgaccagcagctgttggaccaagtgctggccgggacaatcagcccggaggccctcctactcatggacggcgtccgcaggtacctgtgcggcctgggagctgtgggcggtgtgcggctgctgccctctggccagcggctcagcctctaccaggccatgaggcagaagctgctggggcccagggtggccctggccctgctggaggcccaggcggccaccggaaccatcatggaccctcacagcccagagagcctctcggtggatgaggccgtgcgcaggggtgtggtggggccggagctgtatggcaggctgaagcgggctgagggtgccattgctggcttcagagaccccttctctgggaagcaggtgtctgtgttccaggccatgaagaaaggtctcatcccttgggagcaagctgcccgcctcctggaggctcaagtggccacaggagggatcattgaccccaccagccaccaccacctccccatgccagtggccattcagcgtggctatgttgaccaggagatggagacagccttgtccagctcctccgagaccttccccacaccggacggccaggggcgcacgagctatgcccagctcctggaggagtgccccagggatgagacttctggccttcacctcctgcccctgccagaaagtgctcctgccctccccaccgaggagcaggtccagaggagcctgcaggccgtgccgggggccaaggatggcacatccctctgggacctgctcagctcctgccacttcaccgaggagcaacggaggggcctgctggaggacgtgcaggaggggaggaccactgtgccacagctgctagcctctgtgcagaggtgggtacaggagaccaagcttctggcccaggcccgcgtcatggtgcccggcccacggggtgaggtacccgctgtctggctgctggatgctggcatcatcacccaggagacccttgaggccctggctcagggcacgcagtcgcccgcccaggtcgccgagcagccggcggtgaaggcctgcctgtggggcacaggctgcgtggccggtgtgctgctacagccctctggggccaaggccagcatcgcccaggccgtgagggatggcctcctgcccacaggcctgggccagaggctgctggaagcccaggtggcatctggcttccttgttgaccccctgaacaaccagagactgtcagtggaggacgcggttaaggtcggcctggtgggcagggagctgagtgagcagctcgggcaggccgagagggcggcggccgggtacccagatccctactctagggcctccctctctctgtggcaggccatggagaaggggctcgtgccacagaacgagggcttgcccctcctgcaggtgcagctggccacagggggtgtggtggaccctgtccacggggtgcacctgccccaggcggcagcctgcagactcggccttctggacacacagacgagccaggtgctgactgcagttgacaaggacaacaagttcttctttgaccccagtgcgcgggaccaggtgacctaccagcagctcagggagcgctgcgtgtgcgactccgagaccggattgttgctgttgccactgccttcagacacagtgcttgaggtggacgaccacaccgcggtggctctgagggccatgaaggtgcccgtcagcacagggaggtttaaggggtgtagcgtgtcactctgggacctgctgctctccgaatacgttggcgctgacaagcggcgggagctggtggcactctgtcggtctgggagggctgcggccctgcggcaggtggtcagcgcagtcaccgccctggtcgaggctgcagagaggcagcccctgcaggccaccttcagagggctccggaagcaggtgtcagccagggacctgttcagggcgcagctgatcagcaggaagacgctggacgagctgagccaggggacaacgactgtgaaggaggtggcggagatggacagcgtgaagcggtccctggagggaggcaacttcattgccggggtccttatccagggcacccaggagaggatgagcatcccagaggccctgaggaggcacatcctgcggcctggcacagccctggtgctgctggaggcacaggcagctaccggcttcatcatcgaccccgcggagaaccggaagctgaccgtggaggaggcgttcaaagcaggaatgttcgggaaagaaacctacgtgaagctgctgtcggccgagcgcgccgtcaccggctacaccgacccctataccgggcagcagatctccctcttccaggccatgcagaaggacctcatcgtccgggagcacggcatccgcctgctggaggcccagatcgccacgggcggcatcatcgaccccgtgcacagccaccgcgtgcccgtggacgtggcctaccgctgcggctacttcgacgaggagatgaaccgcatcctggcggaccccagcgacgacaccaagggcttcttcgaccccaacacgcacgagaacctcacgtacctgcagcttctggagcgctgtgtggaggaccccgagacgggcctgtacctgctacaaatcataaagaaaggagaaaactacgtgtacatcaatgaggccacgagacacgtgttgcaatccagaactgcaaaaatgcgcgtggggaggtttgctgaccaggtggtctctttctgggacctgctgtcctctccatacttcacagaggacaggaagcgggagctcatccaggagtatggagcccagagtgggggcctggagaaattgctggaaatcatcaccacgacaattgaagaaacagagacgcaaaaccaaggcatcaaagtggcggccatcagaggggaggtgacagctgcagacctgttcaactccagggtcatcgatcagaagaccctgcacacacttcgtgtggggaggactgggggacaggcactcagcacgctggagtgtgtgaagccctatctggaaggcagcgactgcattgcgggggtcacggtgccctccaccagggaggtcatgagcctccatgaggccagcaggaaggagctcatccctgcagcatttgcgacttggctgctggaggcgcaggccgccaccgggttcctcctggacccctgcacccgccagaagctctctgtggatgaggctgtggatgtgggcctggtgaacgaggagctgcgggagaggctcctgaaggctgaaagagctgccacgggctacagggatccggccacaggagacacgatcccgctgttccaggccatgcagaagcagctcatcgagaaggcggaggcactgaggctgctggaggtgcaggtggccacggggggtgtcatcgacccacagcaccaccaccggctcccactggaaacagcctacagacggggctgtctgcacaaggacatctatgcgctcatttccgaccagaagcacatgaggaaacggtttgtggacccgaacacgcaagagaaggtctcgtaccgagagctgcaggagaggtgccgcccacaagaggacacgggctgggtgctgttcccagtgaacaaggctgcacgggactccgagcacatcgatgacgagacgagaagggccctggaggcagagcaagtggaaatcacagtgggaaggttcagaggccagaaaccaacactgtgggcactactgaattccgaatacgtgacagaggagaagaagctccagctggtgaggatgtatagaacacacaccagacgggcactgcagacggtagcgcagctcatcttagagttgatcgagaagcaggaaaccagcaacaaacacctgtggttccaaggaattagacgacagatcacagcttctgaactcctcagctcagccataatcacggaggaaatgctccaggacctggaaacgggacggagcacgacgcaagagctcatggaggacgaccgcgtcaagcgctacctggagggcaccagctgcatcgcgggcgtcctggtgcccgccaaggaccagcccggccgccaggagaagatgagcatctaccaggccatgtggaagggcgtgctgcggcccggcacggccctggtgctgctggaggcgcaggcggccaccggcttcgtcatcgaccccgtgcgcaacctgaggctgtcggtggaggagcccgtgcccgcgggcgtggtgggcagcgagatccaggagaagctgctgtcggccgagcgcgccgtcaccggctacaccgacccctacaccgggcagcagatctccctcttccaggccatgcagaaggacctcatcgtccgggagcacggcatccgcctgctggaggcccagatcgccacgggcggcgtcatcgaccccgtgcacagccaccgcgtgcccgtggacgtggcctaccggcgcggctacttcgacgaggagatgaaccgtgtcctggccgaccccagcgacgacaccaagggtttcttcgaccccaacacgcacgagaacctcacgtacgtgcagctgctgcgccgctgcgtgcccgacccggacaccgggctctacatgctgcagctggcaggccggggctccgccgtgcaccagctgagcgaggagctgcgctgtgccctgcgcgacgcccgcgtgacgccaggctcgggcgccctccagggccagagcgtctccgtctgggagctcctcttctaccgcgaggtgtccgaggaccggcgccaggacctgctgagcagataccgggcgggcacgctgaccgtggaggagctgggcgccaccctcacctcgctgctggcccaggcccaggcccaggcccgggccgaggccgaggccgggagcccgcgcccagacccccgggaggccctgcgtgcggccaccatggaggtcaaggtgggccgcctccgggggcgcgcggtgcccgtgtgggacgtgctggcgtccggctacgtgagcagggccgcccgggaggagctgctggccgagtttggctcggggaccctggacttgcccgcgctgacccgccggctgaccgccatcatcgaggaggccgaggaagcccccggggcccggccgcagctccaggacgccaggcgcggcccgcgggagccagggccagccgggcgaggggacggcgactcggggcgctcccagcgagagggccagggggagggcgagacccaggaggccgccgccgccgccgccgccgcccgccgccaggagcagaccctgcgtgatgccaccatggaggtgcagcgcgggcagttccaggggcggccggtctccgtgtgggacgtcctcttctcctcgtacctgagcgaggcccgccgagacgagctcctggcccagcacgcggccggcgccctgggcctgcccgacctcgtcgccgtcctcacccgggtcatcgaggagacggaggagcggctcagcaaggtgtccttccgcggcctgaggcgccaggtgtccgcctccgagctgcacacgtccgggatcctgggccccgagaccctgcgggacctggcccagggcactaagacgctgcaggaggtgacggagatggactcggtcaagcgctacctggagggcaccagctgcatcgcgggcgtcctggtgcccgccaaggaccagcccggccgccaggagaagatgagcatctaccaggccatgtggaagggcgtgctgcggcccggcacggccctggtgctgctggaggcgcaggcggccaccggcttcgtcatcgaccccgtgcgcaacctgaggctgtcggtggaggaggccgtggccgcgggcgtggtgggcggcgagatccaggagaagctgctgtcggccgagcgcgccgtcaccggctacaccgacccctacaccgggcagcagatctccctcttccaggccatgcagaaggacctcatcgtccgggagcacggcatccgcctgctggaggcccagatcgccacgggcggcgtcatcgaccccgtgcacagccaccgcgtgcccgtggacgtggcctaccggcgcggctacttcgacgaggagatgaaccgtgtcctggccgaccccagcgacgacaccaagggtttcttcgaccccaacacgcacgagaacctcacgtacgtgcagctgctgcgccgctgcgtgcccgacccggacaccgggctctacatgctgcagctggcaggccggggctccgccgtgcaccagctgagcgaggagctgcgctgtgccctgcgcgacgcccgcgtgacgccaggctcgggcgccctccagggccagagcgtctccgtctgggagctcctcttctaccgcgaggtgtccgaggaccggcgccaggacctgctgagcagataccgggcgggcacgctgaccgtggaggagctgggcgccaccctcacctcgctgctggcccaggcccaggcccaggcccgggccgaggccgaggccgggagcccgcgcccagacccccgggaggccctgcgtgcggccaccatggaggtcaaggtgggccgcctccgggggcgcgcggtgcccgtgtgggacgtgctggcgtccggctacgtgagcggggccgcccgggaggagctgctggccgagtttggctcggggaccctggacttgcccgcgctgacccgccggctgaccgccatcatcgaggaggccgaggaggcccccggggcccggccgcagctccaggacgcctggcgcggcccgcgggagccagggccagccgggcgaggggacggcgactcggggcgctcccagcgagagggccagggggagggcgagacccaggaggccgccgccgccgccgccgccgcccgccgccaggagcagaccctgcgtgatgccaccatggaggtgcagcgcgggcagttccaggggcggccggtctccgtgtgggacgtcctcttctcctcgtacctgagcgaggcccgccgagacgagctcctggcccagcacgcggccggcgccctgggcctgcccgacctcgtcgccgtcctcacccgggtcatcgaggagacggaggagcggctcagcaaggtgtccttccgcggcctgaggcgccaggtgtccgcctccgagctgcacacgtccgggatcctgggccccgagaccctgcgggacctggcccagggcactaagacgctgcaggaggtgacggagatggactcggtcaagcgctacctggagggcaccagctgcatcgcgggcgtcctggtgcccgccaaggaccagcccggccgccaggagaagatgagcatctaccaggccatgtggaagggcgtgctgcggcccggcacggccctggtgctgctggaggcgcaggcggccaccggcttcgtcatcgaccccgtgcgcaacctgaggctgtcggtggaggaggccgtggccgcgggcgtggtgggcggcgagatccaggagaagctgctgtcggccgagcgcgccgtcaccggctacaccgacccctacaccgggcagcagatctccctcttccaggccatgcagaaggacctcatcgtccgggagcacggcatccgcctgctggaggcccagatcgccacgggcggcgtcatcgaccccgtgcacagccaccgcgtgcccgtggacgtggcctaccggcgcggctacttcgacgaggagatgaaccgtgtcctggccgaccccagcgacgacaccaagggtttcttcgaccccaacacgcacgagaacctcacgtacgtgcagctgctgcgccgctgcgtgcccgacccggacaccgggctctacatgctgcagctggcaggccggggctccgccgtgcaccagctgagcgaggagctgcgctgtgccctgcgcgacgcccgcgtgacgccaggctcgggcgccctccagggccagagcgtctccgtctgggagctcctcttctaccgcgaggtgtccgaggaccggcgccaggacctgctgagcagataccgggcgggcacgctgaccgtggaggagctgggcgccaccctcacctcgctgctggcccaggcccaggcccaggcccgggccgaggccgaggccgggagcccgcgcccagacccccgggaggccctgcgtgcggccaccatggaggtcaaggtgggccgcctccgggggcgcgcggtgcccgtgtgggacgtgctggcgtccggctacgtgagcggggccgcccgggaggagctgctggccgagtttggctcggggaccctggacttgcccgcgctgacccgccggctgaccgccatcatcgaggaggccgaggaggcccccggggcccggccgcagctccaggacgcctggcgcggcccgcgggagccagggccagccgggcgaggggacggcgactcggggcgctcccagcgagagggccagggggagggcgagacccaggaggccgccgccgccgccgccgccgcccgccgccaggagcagaccctgcgtgatgccaccatggaggtgcagcgcgggcagttccaggggcggccggtctccgtgtgggacgtcctcttctcctcgtacctgagcgaggcccgccgagacgagctcctggcccagcacgcggccggcgccctgggcctgcccgacctcgtcgccgtcctcacccgggtcatcgaggagacggaggagcggctcagcaaggtgtccttccgcggcctgaggcgccaggtgtccgcctccgagctgcacacgtccgggatcctgggccccgagaccctgcgggacctggcccagggcactaagacgctgcaggaggtgacggagatggactcggtcaagcgctacctggagggcaccagctgcatcgcgggcgtcctggtgcccgccaaggaccagcccggccgccaggagaagatgagcatctaccaggccatgtggaagggcgtgctgcggcccggcacggccctggtgctgctggaggcgcaggcggccaccggcttcgtcatcgaccccgtgcgcaacctgaggctgtcggtggaggaggccgtggccgcgggcgtggtgggcggcgagatccaggagaagctgctgtcggccgagcgcgccgtcaccggctacaccgacccctacaccgggcagcagatctccctcttccaggccatgcagaaggacctcatcgtccgggagcacggcatccgcctgctggaggcccagatcgccacgggcggcgtcatcgaccccgtgcacagccaccgcgtgcccgtggacgtggcctaccggcgcggctacttcgacgaggagatgaaccgtgtcctggccgaccccagcgacgacaccaagggcttcttcgaccccaacacgcacgagaacctcacgtacgtgcagctgctgcgccgctgcgtgcccgacccggacaccgggctctacatgctgcagctggcaggccggggctccgccgtgcaccagctgagcgaggagctgcgctgtgccctgcgcgacgcccgcgtgacgccaggctcgggcgccctccagggccagagcgtctccgtctgggagctcctcttctaccgcgaggtgtccgaggaccggcgccaggacctgctgagcagataccgggcgagcacgctgaccgtggaggagctgggcgccaccctcacctcgctgctggcccaggcccaggcccaggcccgggccgaggccgaggccgggagcccgcgcccagacccccgggaggccctgcgtgcggccaccatggaggtcaaggtgggccgcctccgggggcgcgcggtgcccgtgtgggacgtgctggcgtccggctacgtgagcagggccgcccgggaggagctgctggccgagtttggctcggggaccctggacttgcccgcgctgacccgccggctgaccgccatcatcgaggaggccgaggaggcccccggggcccggccgcagctccaggacgcctggcgcggcccgcgggagccagggccagccgggcgaggggacggcgactcggggcgctcccagcgagagggccagggggagggcgagacccaggaggccgccgccgccaccgccgccgcccgccgccaggagcagaccctgcgtgatgccaccatggaggtgcagcgcgggcagttccaggggcggccggtctccgtgtgggacgtcctcttctcctcgtacctgagcgaggcccgccgagacgagctcctggcccagcacgcggccggcgccctgggcctgcccgacctcgtcgccgtcctcacccgggtcatcgaggagacggaggagcggctcagcaaggtgtccttccgcggcctgaggcgccaggtgtccgcctccgagctgcacacgtccgggatcctgggccccgagaccctgcgggacctggcccagggcactaagacgctgcaggaggtgacggagatggactcggtcaagcgctacctggagggcaccagctgcatcgcgggcgtcctggtgcccgccaaggaccagcccggccgccaggagaagatgagcatctaccaggccatgtggaagggcgtgctgcggcccggcacggccctggtgctgctggaggcgcaggcggccaccggcttcgtcatcgaccccgtgcgcaacctgaggctgtcggtggaggaggccgtggccgcgggcgtggtgggcggcgagatccaggagaagctgctgtcggccgagcgcgccgtcaccggctacaccgacccctacaccgggcagcagatctccctcttccaggccatgcagaaggacctcatcgtccgggagcacggcatccgcctgctggaggcccagatcgccacgggcggcgtcatcgaccccgtgcacagccaccgcgtgcccgtggacgtggcctaccggcgcggctacttcgacgaggagatgaaccgtgtcctggccgaccccagcgacgacaccaagggcttcttcgaccccaacacgcacgagaacctcacgtacgtgcagctgctgcgccgctgcgtgcccgacccggacaccgggctctacatgctgcagctggcaggccggggctccgccgtgcaccagctgagcgaggagctgcgctgtgccctgcgcgacgcccgcgtgacgccaggctcgggcgccctccagggccagagcgtctccgtctgggagctcctcttctaccgcgaggtgtccgaggaccggcgccaggacctgctgagcagataccgggcgggcacgctgaccgtggaggagctgggcgccaccctcacctcgctgctggcccaggcccaggcccaggcccgggccgaggccgaggccgggagcccgcgcccagacccccgggaggccctgcgtgcggccaccatggaggtcaaggtgggccgcctccgggggcgcgcggtgcccgtgtgggacgtgctggcgtccggctacgtgagcggggccgcccgggaggagctgctggccgagtttggctcggggaccctggacttgcccgcgctgacccgccggctgaccgccatcatcgaggaggccgaggaggcccccggggcccggccgcagctccaggacgcctggcgcggcccgcgggagccagggccagccgggcgaggggacggcgactcggggcgctcccagcgagagggccagggggagggcgagacccaggaggccgccgccgccgccgccgccgcccgccgccaggagcagaccctgcgtgatgccaccatggaggtgcagcgcgggcagttccaggggcggccggtctccgtgtgggacgtcctcttctcctcgtacctgagcgaggcccgccgagacgagctcctggcccagcacgcggccggcgccctgggcctgcccgacctcgtcgccgtcctcacccgggtcatcgaggagacggaggagcggctcagcaaggtgtccttccgcggcctgaggcgccaggtgtccgcctccgagctgcacacgtccgggatcctgggccccgagaccctgcgggacctggcccagggcactaagacgctgcaggaggtgacggagatggactcggtcaagcgctacctggagggcaccagctgcatcgcgggcgtcctggtgcccgccaaggaccagcccggccgccaggagaagatgagcatctaccaggccatgtggaagggcgtgctgcggcccggcacggccctggtgctgctggaggcgcaggcggccaccggcttcgtcatcgaccccgtgcgcaacctgaggctgtcggtggaggaggccgtggccgcgggcgtggtgggcggcgagatccaggagaagctgctgtcggccgagcgcgccgtcaccggctacaccgacccctacaccgggcagcagatctccctcttccaggccatgcagaaggacctcatcgtccgggagcacggcatccgcctgctggaggcccagatcgccacgggcggcgtcatcgaccccgtgcacagccaccgcgtgcccgtggacgtggcctaccggcgcggctacttcgacgaggagatgaaccgcgtcctggccgaccccagcgacgacaccaagggcttcttcgaccccaacacgcacgagaacctcacgtacctgcagcttctgcagagggccaccctggaccctgagacggggctcctatttctttctctctctctacag

SEQ ID NO: 134 - protein, 5090 aa, Homo sapiens
MSGHTLPPLPVPGTNSTEQASVPRAMAATLGAGTPPRPQARSIAGVYVEASGQAQSVYAAMEQGLLPAGLGQALLEAQAATGGLVDLARGQLLPVSKALQQGLVGLELKEKLLAAERATTGYPDPYGGEKLALFQAIGKEVVDRALGQSWLEVQLATGGLVDPAQGVLVAPEPACHQGLLDRETWHKLSELEPGTGDLRFLNPNTLERLTYHQLLERCVRAPGSGLALLPLKITFRSMGGAVSAAELLEVGILDEQAVQGLREGRLAAVDVSARAEVRRYLEGTGSVAGVVLLPEGHKKSFFQAATEHLLPMGTALPLLEAQAATHTLVDPITGQRLWVDEAVRAGLVSPELHEQLLVAEQAVTGHHDPFSGSQIPLFQAMKKGLVDRPLALRLLDAQLATGGLVCPARRLRLPLEAALRCGCLDEDTQRQLSQAGSFSDGTHGGLRYEQLLALCVTDPETGLAFLPLSGGPRGGEPQGPPFIKYSTRQALSTATATVSVGKFRGRPVSLWELLFSEAISSEQRAMLAQQYQEGTLSVEKLAAELSATLEQAAATARVTFSGLRDTVTPGELLKAEIIDQDLYERLEHGQATAKDVGSLASAQRYLQGTGCIAGLLLPGSQERLSIYEARCKGLLRPGTALILLEAQAATGFIIDPKANKGHSVEEALRAAVIGPDVFAKLLSAERAVTGYTDPYTGQQISLFQAMQKGLIVREHGIRLLEAQIATGGVIDPVHSHRVPVDVAYRRGYFDQMLNLILLDPSDDTKGFFDPNTHENLTYLQLLERCVRDPETGLYLLPLSSTQSPLVDSATQQAFQNLLLSVKYGRFQGQRVSAWELINSEYFSEGRRRQLLRRYRQREVTLGQVAKLLEAETQRQADIMLPALRSRVTVHQLLEAGIIDQQLLDQVLAGTISPEALLLMDGVRRYLCGLGAVGGVRLLPSGQRLSLYQAMRQKLLGPRVALALLEAQAATGTIMDPHSPESLSVDEAVRRGVVGPELYGRLKRAEGAIAGFRDPFSGKQVSVFQAMKKGLIPWEQAARLLEAQVATGGIIDPTSHHHLPMPVAIQRGYVDQEMETALSSSSETFPTPDGQGRTSYAQLLEECPRDETSGLHLLPLPESAPALPTEEQVQRSLQAVPGAKDGTSLWDLLSSCHFTEEQRRGLLEDVQEGRTTVPQLLASVQRWVQETKLLAQARVMVPGPRGEVPAVWLLDAGIITQETLEALAQGTQSPAQVAEQPAVKACLWGTGCVAGVLLQPSGAKASIAQAVRDGLLPTGLGQRLLEAQVASGFLVDPLNNQRLSVEDAVKVGLVGRELSEQLGQAERAAAGYPDPYSRASLSLWQAMEKGLVPQNEGLPLLQVQLATGGVVDPVHGVHLPQAAACRLGLLDTQTSQVLTAVDKDNKFFFDPSARDQVTYQQLRERCVCDSETGLLLLPLPSDTVLEVDDHTAVALRAMKVPVSTGRFKGCSVSLWDLLLSEYVGADKRRELVALCRSGRAAALRQVVSAVTALVEAAERQPLQATFRGLRKQVSARDLFRAQLISRKTLDELSQGTTTVKEVAEMDSVKRSLEGGNFIAGVLIQGTQERMSIPEALRRHILRPGTALVLLEAQAATGFIIDPAENRKLTVEEAFKAGMFGKETYVKLLSAERAVTGYTDPYTGQQISLFQAMQKDLIVREHGIRLLEAQIATGGIIDPVHSHRVPVDVAYRCGYFDEEMNRILADPSDDTKGFFDPNTHENLTYLQLLERCVEDPETGLYLLQIIKKGENYVYINEATRHVLQSRTAKMRVGRFADQVVSFWDLLSSPYFTEDRKRELIQEYGAQSGGLEKLLEIITTTIEETETQNQGIKVAAIRGEVTAADLFNSRVIDQKTLHTLRVGRTGGQALSTLECVKPYLEGSDCIAGVTVPSTREVMSLHEASRKELIPAAFATWLLEAQAATGFLLDPCTRQKLSVDEAVDVGLVNEELRERLLKAERAATGYRDPATGDTIPLFQAMQKQLIEKAEALRLLEVQVATGGVIDPQHHHRLPLETAYRRGCLHKDIYALISDQKHMRKRFVDPNTQEKVSYRELQERCRPQEDTGWVLFPVNKAARDSEHIDDETRRALEAEQVEITVGRFRGQKPTLWALLNSEYVTEEKKLQLVRMYRTHTRRALQTVAQLILELIEKQETSNKHLWFQGIRRQITASELLSSAIITEEMLQDLETGRSTTQELMEDDRVKRYLEGTSCIAGVLVPAKDQPGRQEKMSIYQAMWKGVLRPGTALVLLEAQAATGFVIDPVRNLRLSVEEPVPAGVVGSEIQEKLLSAERAVTGYTDPYTGQQISLFQAMQKDLIVREHGIRLLEAQIATGGVIDPVHSHRVPVDVAYRRGYFDEEMNRVLADPSDDTKGFFDPNTHENLTYVQLLRRCVPDPDTGLYMLQLAGRGSAVHQLSEELRCALRDARVTPGSGALQGQSVSVWELLFYREVSEDRRQDLLSRYRAGTLTVEELGATLTSLLAQAQAQARAEAEAGSPRPDPREALRAATMEVKVGRLRGRAVPVWDVLASGYVSRAAREELLAEFGSGTLDLPALTRRLTAIIEEAEEAPGARPQLQDARRGPREPGPAGRGDGDSGRSQREGQGEGETQEAAAAAAAARRQEQTLRDATMEVQRGQFQGRPVSVWDVLFSSYLSEARRDELLAQHAAGALGLPDLVAVLTRVIEETEERLSKVSFRGLRRQVSASELHTSGILGPETLRDLAQGTKTLQEVTEMDSVKRYLEGTSCIAGVLVPAKDQPGRQEKMSIYQAMWKGVLRPGTALVLLEAQAATGFVIDPVRNLRLSVEEAVAAGVVGGEIQEKLLSAERAVTGYTDPYTGQQISLFQAMQKDLIVREHGIRLLEAQIATGGVIDPVHSHRVPVDVAYRRGYFDEEMNRVLADPSDDTKGFFDPNTHENLTYVQLLRRCVPDPDTGLYMLQLAGRGSAVHQLSEELRCALRDARVTPGSGALQGQSVSVWELLFYREVSEDRRQDLLSRYRAGTLTVEELGATLTSLLAQAQAQARAEAEAGSPRPDPREALRAATMEVKVGRLRGRAVPVWDVLASGYVSGAAREELLAEFGSGTLDLPALTRRLTAIIEEAEEAPGARPQLQDAWRGPREPGPAGRGDGDSGRSQREGQGEGETQEAAAAAAAARRQEQTLRDATMEVQRGQFQGRPVSVWDVLFSSYLSEARRDELLAQHAAGALGLPDLVAVLTRVIEETEERLSKVSFRGLRRQVSASELHTSGILGPETLRDLAQGTKTLQEVTEMDSVKRYLEGTSCIAGVLVPAKDQPGRQEKMSIYQAMWKGVLRPGTALVLLEAQAATGFVIDPVRNLRLSVEEAVAAGVVGGEIQEKLLSAERAVTGYTDPYTGQQISLFQAMQKDLIVREHGIRLLEAQIATGGVIDPVHSHRVPVDVAYRRGYFDEEMNRVLADPSDDTKGFFDPNTHENLTYVQLLRRCVPDPDTGLYMLQLAGRGSAVHQLSEELRCALRDARVTPGSGALQGQSVSVWELLFYREVSEDRRQDLLSRYRAGTLTVEELGATLTSLLAQAQAQARAEAEAGSPRPDPREALRAATMEVKVGRLRGRAVPVWDVLASGYVSGAAREELLAEFGSGTLDLPALTRRLTAIIEEAEEAPGARPQLQDAWRGPREPGPAGRGDGDSGRSQREGQGEGETQEAAAAAAAARRQEQTLRDATMEVQRGQFQGRPVSVWDVLFSSYLSEARRDELLAQHAAGALGLPDLVAVLTRVIEETEERLSKVSFRGLRRQVSASELHTSGILGPETLRDLAQGTKTLQEVTEMDSVKRYLEGTSCIAGVLVPAKDQPGRQEKMSIYQAMWKGVLRPGTALVLLEAQAATGFVIDPVRNLRLSVEEAVAAGVVGGEIQEKLLSAERAVTGYTDPYTGQQISLFQAMQKDLIVREHGIRLLEAQIATGGVIDPVHSHRVPVDVAYRRGYFDEEMNRVLADPSDDTKGFFDPNTHENLTYVQLLRRCVPDPDTGLYMLQLAGRGSAVHQLSEELRCALRDARVTPGSGALQGQSVSVWELLFYREVSEDRRQDLLSRYRASTLTVEELGATLTSLLAQAQAQARAEAEAGSPRPDPREALRAATMEVKVGRLRGRAVPVWDVLASGYVSRAAREELLAEFGSGTLDLPALTRRLTAIIEEAEEAPGARPQLQDAWRGPREPGPAGRGDGDSGRSQREGQGEGETQEAAAATAAARRQEQTLRDATMEVQRGQFQGRPVSVWDVLFSSYLSEARRDELLAQHAAGALGLPDLVAVLTRVIEETEERLSKVSFRGLRRQVSASELHTSGILGPETLRDLAQGTKTLQEVTEMDSVKRYLEGTSCIAGVLVPAKDQPGRQEKMSIYQAMWKGVLRPGTALVLLEAQAATGFVIDPVRNLRLSVEEAVAAGVVGGEIQEKLLSAERAVTGYTDPYTGQQISLFQAMQKDLIVREHGIRLLEAQIATGGVIDPVHSHRVPVDVAYRRGYFDEEMNRVLADPSDDTKGFFDPNTHENLTYVQLLRRCVPDPDTGLYMLQLAGRGSAVHQLSEELRCALRDARVTPGSGALQGQSVSVWELLFYREVSEDRRQDLLSRYRAGTLTVEELGATLTSLLAQAQAQARAEAEAGSPRPDPREALRAATMEVKVGRLRGRAVPVWDVLASGYVSGAAREELLAEFGSGTLDLPALTRRLTAIIEEAEEAPGARPQLQDAWRGPREPGPAGRGDGDSGRSQREGQGEGETQEAAAAAAAARRQEQTLRDATMEVQRGQFQGRPVSVWDVLFSSYLSEARRDELLAQHAAGALGLPDLVAVLTRVIEETEERLSKVSFRGLRRQVSASELHTSGILGPETLRDLAQGTKTLQEVTEMDSVKRYLEGTSCIAGVLVPAKDQPGRQEKMSIYQAMWKGVLRPGTALVLLEAQAATGFVIDPVRNLRLSVEEAVAAGVVGGEIQEKLLSAERAVTGYTDPYTGQQISLFQAMQKDLIVREHGIRLLEAQIATGGVIDPVHSHRVPVDVAYRRGYFDEEMNRVLADPSDDTKGFFDPNTHENLTYLQLLQRATLDPETGLLFLSLSLQ

SEQ ID NO: 135 - DNA, 21627 bp, Mus musculus
  CDS (1134)..(20777)
  Misc_Feature (10276)..(10276): w at position 10276 is a or t
ggatgggcaggagaggtgtgccatctgctttggcctagcgacatgggatctctgagcagcaaaggggagaaccagccagaagatccacgaaaggttcctgtgctggactcctagtgtgccagcccctgaggtcatcaccctgaggctctggacctccaaccaaatgggcactaacagacccctgtctctgaaggtgagagctgggatgggcttcagagctaggtcctcctgatgctaggtcctcctgatgctaggttctcctgatgctgggtccttcagatggactgaggaacttatttgagccccaggggggtgggaaatgtcagggagctgaatggtgagatgaagcctggccaccccttgcagacagggctgccaattgtcaaagaccgcagagactccagctcctacaaggtcaaaacctcagagcagtccactgaggagctgtgaagactccaagatccagaagatagggacaggaaaccgtggcagagcatgctcagggactgagcaggagcttggagcacacagagtggggttgggtctctcaccaggctggcctcgaactcagaaatctgcctgcctctgtctcccaggtgctgggattaaaggcgtgcaccgccactgtcccggcatgtctctcactctcagcaataaagaggagtttggggaactgaaactctctttggtgggtcttcatttcccttgcaaacttcattcaaaagccacagagcccatgttgctctccactcccaacccagagcaggcccgcattctttttcaatgacttgtagtagggagggagggagggagggaggaaaggagggactttgcaactcaacagcctctcccagcttgagttgctcagaggtagccctgccccatgctttagtttgtgttcacctgcccactccacctgtcctgtggggtgcccaacctggctttcagccccgcctaccgccctcaatggggaagggacttgggtcaacatagggaggggccatgccgatttaaatgcttgtggcgcggggctcccggcgtggagggagcggagagacagaggaccgcgccagccttgtcacgacaggacacaagcagaccttaagcaagttctgtgccaccagctgtccacgatgaacggccaggcccctcctcatgatgtcgtagttgccaatggaactgagaagttcattgtccctaaaatcaagaagaaccaattgggagccagcactccttcaaggccccaagcagaagctgccctacctaccacagccagaagtattgctggggtatatgtggaggcctcggggcagacccagagcatctatgctgctataaagcagggcctcctgcccactgggcttggactgactttgcttgaggcccaggcagccactgggggcctcgtggaccttgcccagggccagcttcttcctgtgtctgaggccctaaggcggggtctagtgggattggagcttaaggagaaattactggctgctgaacgtgcagttactggctatcccgacccctatgggggtgaaaagctgtccctcttccaggccatcaagaaagaagttgtagacaggaccctggggtggagattgctagaggcccagctagctactgggggcctggtggacccaacccagggtgtgcaagtagccccagagctagcctgccagcagggccttttggataaggagacatggctcagcctggtggagtcagagcccagtatgggtacccctggtttttctgaccccaacacgctggagcagctgccatactctgtgctgttgggtaggtgtgtgcaagaccccagctcagggctgcccctattgcccttaaagaccactttccacaccctggctggagcagccagtgcgtcaatgctgctggaggcgggagtactaaatgaagagatggtccgagacctgcaggagggcatgctggtggtgtcagacgtgggcacacgtcccgaggtgcgacgttatctggaaggcactggagggttagcgggggttgtcctgttgcctggaggtcacaagaagagctttttccaggctacagttgaacacttggtctcaaagggtattgcactacaactcttagaggctcaggctgccacccgcacccttgtgcacccaaccacaggccagcgtctttgggtggaagaggcagtcaaggctggcctggttggcccagaacttcatgagcagctcctggttgcagaacaggcagtaactgggtattatgacccctttagcagctcccgaatccccgttttccaggctatgaagaagggacttgtggaccagccactggctctgcgtctcctagatgcccagctagctacaggtgggcttatatgcccagctcgcagattccggctgcccctggaggctgccctgcgctttggctgtctggacgaagagactcggcaacgtctctctcaggcaatgggcttttcagatcctaccacacacgatcgtcttggctatgaacagctgctggccctctctgttactgacccagagacagggcttgccttcctgcctctccctggaatgtcccacgcaaatgagccccagggacccacatttattgatcactgtactcgacaggccttgagcaaggctacaacctccatctctgtagggaggtaccagggcaggcctgtctccctctgggaactgctcttttctgagtcagtgcccgttaagaagagggcaatgcttgcccagcggcaccaggaaggggctctgtccgtggaggagctggcagctgagctgaagaacattgttgagcaggctgccgcaactgccaaagtcacctttgctgggttgagggacaccgtgacaccaggagagttgttgaaagctgagataatcaatcaggacctgtttgagcagttggaacgtggacagacctcagcccaagatgtgggcagcctggactccgtgcagaggtacctgcagggcacaggcagtattgcaggccttttgcttcctgactcccaggaacgactcagtatctatgaggcccgtagcaaggggctcctcaggcctggtactgccctgatcttgcttgaggcccaggctgccacaggctttatcattgacccaaaagagaacaagagatactctgtggaggaggcactgagggctggtgtcattgggcccgatgtatatgccaagttgctctctgcagaacatgccgtgactggctacacggacccctactctggggagcagatctccctcttccaggccatgcagagggacctcattgtgagagaccacggcattcgcctgctggaggcccagatcgccacaggtggtgtcattgaccccgtgcacagccaccgtgtgcccgtggacgtggcctaccaacgtggctactttgatcagattctgaactctatcctgctggacccttctgatgacaccaagggcttctttgaccccaacacgcatgaaaatctcacttacctgcagctcctggagcgctgtgtacatgactccgagacaggcctgcacctcctgcccctcagtagtacacgaccccagctggtggatagctccactcggcaggccttccagaagctactgctctccgtgaaatatggacggttccgggggcagagagtttctgcgtgggagctggttaactctgaatatttcacagaggaccggaggaggcagctcctgcaacgttatcggcagcgcaagatcacactggagcaggtcactcagctgctggagaaagagatgaggaggtggacagacatcacactgcctgccctacagggccaggtcactgcctaccagcttctagaggcccacatcatcaaccaggagctcctggaccaggtgctgacagggacgatcagcccagatgccctccttcaggtgggtgatgttcacaggtaccttcggggctcaggcactgtgggtggtgtgctgctaaagccctccaaccagcgaatcagtctctaccaggccatgaagcagaagctgctgccacctagtacagctttggccttgctggaggcccaggcagccactggaactatcactgacccctgcagtatggagaccctgtcagtagatgaggccgtgtgccggggagttgtgggagcagaagtatatggcaagttgaagcgagcagaacattctatcactggctacagagaccccttttctggaaaaaaggtgtccctgttcagggccatgaagaagggcctcgtccccgtggagcaggcgacccgcctactagaggcacaggtgtccacaggaggggtcgttgatcccacaacccacctccacctccccatgcctgtggcagtccagcgtggctgcattgatcgagagatggaggcggccttgtccagatctcctgagacctttcccacacccgatggccgggggcacaccagctatgcccagcttctggaacactgtctccaggacaaagcctctgggcttcacctcctgcccctgacagaagatgcccccaacgtccccactgacacacagatccaggagaccctgcaagcatcagctggcactgaagacggtttgtcgctctgggacttgctcacctcttgccactttaccgaggaacagcgccgcggctacctcgaggatgtgaaggttgggaagatttctgtgccacagctacagaacactgtgcgcagctgggtgcactcagcgaaactcctggcccgggcccgcatcactgtgccaggcccacggggcgaggtccctgccacttggctacgagatgctggtattatcacccaagagacgctggaagcactggcacagggcatgcagtctcccgatgaggtagccaaacagcctacggtgaaggtctgcctctggggtacgggctgtgtggccggggtgctgctccagccctcggggaccaagttgagcattgcccaggctgtaagagatggcctcctgcccacaggtctgggccagcagctgctggaggcccaggtggcatctggcttcctcgtcaatccgctaaccaaccagagattgtcagtggagggtgcagtgaaggctggcctggtgggcatggagcagagtgaacatctgaggcaggttgaaaaggctgtgacagggtactcagaccccttttcaggaggttccctttctctgtggcaggccatggagaaggggcttgtaacccaaagtgaggcctttcctctcctgcaagtccagctggccacagggggtgttgtggaccccgtccatggagtgcacctgccccaggaagtggcctacaagcttggtctcctggacgagcagacaagccgagtgctgaccgccactgggaaggaaaacaaactcttttttgaccccaactcccgtgagaaggtgacataccagcagctcagggaactctgtgtgctggatgccgacactggcttgtggctgctgcccctgccccagggcactgtgcttgaagtggatgaccatactgcggtggcactgagggctatgaaggtgcccatcaacatggggaggttccaagggcacagtgtgtcactctgggacctgctacactctgagtatgttggggctgagaagcggagggagctggtggcactttgttgttccgggagggctgccgctctgcgacaggtcatcggtatgctcaccaccctggtggaagctgcagagaagcagccctcgcaggccaccttcaaagggctccggaagcaggtttcagctggggacttgtttaggtcccagctgatcaccaagcagacactggatgagctcaatcaggggaagaggacggtccaggaagtgacagagatggatagtgtgaggaggtccctggaaggaggcaacttcattgctggggtccttattcaggatacaaaagagaagatgagtatcccagaggccttgagaaggcacattctgaggccaggcacagccctggtgctgctggaggcacaggcagccactggtttcatcattgaccccgtggaaaaccggaagctaactgtagagcaagcgttccaggcagggatgtttgggaaggaaacctacatgaagctgttatcagccgagcgggctgtcaccggctatacagacccttacacgggagaacagatctccctctttcaggccatgcagagggaccttattgtcagggaccatggcatccgtctactggaggcccagatcgccacaggtggtatcattgaccctgtgcacagccaccgtgtgcctgtggacgtggcctaccaacgtggctacttcaatgaggagatgaaccgcatcttgtctgacccaagcgatgacaccaagggcttctttgaccccaacacccatgagaacctcacttacctgcagctgctagagcgctgtgtggaggaccctgagactggcctgtatatgttggaaattgtaaagaaaggagaaacctacacatacattgatgaagccacaaggcaagctctgacatccagaactgtgaaaatgtatgtagggaagtttgcaggccagacggtgtctgtgtgggacctgttatcttcccagtattttaccgaaggaaggaggagaaagcttttgcgggagtacagagcccagaacataggcctggagaatctgctggaggtgattacctcgaccgtggaagaaacagagaagcaaagtcaaatattcaaggtgccgggtatccatggcgacgtgacagctgcagaactgttcaactccgggatccttaacaagaagaccctggatgcactccgcagtggggatagagggttccaggacctccgctggctggaggatgtacgtgtctacctggagggcagcaattacatcgctggagtgatagcacccctaacccagaaggtcatgagcttctacgaggccagcagggaagagctcatccccgcagggtttgcagctcagatgctggaggcacaggctgccactgggtacctaatggacccttgcaccaaccagaggctgtgtgtggatgaggccatagcagctgggctggtgggtgaagacctgagagagagacttgtgaatgcagagatggcagcaaagggctacaaagacccagccacaggggagactatcccactctaccaggccatggagaggaagttagtcggaagggaggaggcactgaggttgctggaggtgcaggtggccacgggtggggtcattgaccctcggcaccaccatcgggtccctctggatacagcctgccagcggggctgtatgtgtgacgacagccttgttctcattgctgaccaaaagcacatgaggaaaaggtttgtggatcccaacacacaagaaaaggtcacataccaggagctgcaggaccggtgccagcgggaagagaagtcaggctgggctctgttcccagtggtcaaggacaaaaaggacatagaatatgttgatgaggccaccaaaagggccctggaggcagaacaggtggaagtgactgtggggaggtacagaggccagaggcgatctgtgtgggaactgctgaactcagagtatgtgtctgaagagaagaagatggaactagttagactatacaaagaggacacaacccgggcactgcagaaggtggtagagctcatcctacaaatgattgcagacaaggaaaggagaagcaggcaactctggttccgaggattaagaactcaggtcacagctgaggaactgctgaggtcagaggtcatcacaaaacagactctggaggacctggaagaagggagaaccacagtagatcagattgaacgaaaggaagacgtgaagagatacctcaagggaaccagctgcatagcgggggtcctggtgcccgtccagggagagcctgggcgccaggagaagatgagcatctatcaggccatgtggaagggagtcctgaggccaggcacagccctggtgctgctggaggctcaggcagccacaggcttcatcatcgacccagtgaacaaccgcagactgtctgtggaggaggccgtggctgcaggcgtggtgggaggcgagatccaagagaagctgctgtctgctgagcgtgcggtcaccgggtacacggacccctacaccggggaccagatctccctcttccaggccatgcagagggacctcattgtgagagaccatggcattcgtttgttggaagcccagattgccacgggtggcgtcatcgatcctgtgcacagccaccgtgtgcccgtggacgtggcctaccagcgtggctactttgatgaagacatgaacagcattttggcggaccctggtgacgacaccaagggcttctttgaccccaacactcacgagaacctcacttacctacagctgctgcgccgctgtgtgcgcgacccagagactggcttctacatgctgcagctggctggaaagggctccagtgtgcaccacctgagcgaggagctgagacgggccctgcgtgaagcccgtgtgaccccaggcacgggcgacttccagggccagagcatctctgtctgggagcttctcttctaccgagaggtgcctgagagtctgcgccaggacctgctgcgttgctaccaggcaggtgggctcaccgttcatgacgtgaccaccacactcacctcactgctggcccgagccaaggatgggagcccacgtggggatccacaaggagccctgggcaaggccaccatggaagtaaaacggggtcatctccggggccacgaggtcccagtgtgggacattctgacatccaactatgtgagcagggacacccggaaggagctgctggcccagttcagctctgggtcgctgactctgcccatgctgaagaggagactgaccaccattattgaggaggctgaggagacacaggagtccaagccaaagccgagagacgcctctcttaagcaacaggacactggggccagaggctcagggacctccccagacgagggagatgctcaggacagctccgagagtgccaggcagcaacaggagcagactctgcgtgccaccaccatgcaggtacaccgtgggcagttccgggaccagcaagtttctgtgtggaaagtcctgttctcctcctacctgagtgagacccgccgggaggagctccttgcccagcacttggctggcaagctgggggtaatggaactcgtttccctcctcacccaaatcatcgaggagacagaagaacggctcagcaaggtgtctttccccggcctgaggcgacaggtgtccgcatctgagttgtgtacctctggcatcctggaccgggacaccatgcgagaactggcacagggcaccaagaccattcatgaggtgacagagatggactccgtcaagcgctacctggggggctccagctgcatagcgggcgtcctggtgcccgtccagggagagcctgggcgccaggagaagatgagcatctatcaggccatgtggaagggagtcctgaggccaggcacagccctggtgctgctggaggctcaggcagccacaggcttcatcatcgacccagtgaacaaccgcagactgtctgtggaggaggccgtggctgcaggcgtggtgggaggcgagatccaagagaagctgctgtctgctgagcgtgcggtcaccgggtacacggacccctacaccggggaccagatctccctcttccaggccatgcagagggacctcattgtgagagaccatggcattcgtttgttggaagcccagattgccacgggtggcgtcatcgaccctgtgcacagccaccgtgtgcccgtggacgtggcctaccagcgtggctactttgatgaagacatgaacagcattttggcggaccctggtgacgacaccaagggcttctttgaccccaacactcacgagaacctcacttacctacagctgctgcgccgctgtgtgcgcgacccagagactggcttctacatgctgcagctggctggaaagggctccagtgtgcaccacctgagcgaggagctgagacgggccctgcgtgaagcccgtgtgaccccaggcacgggcgacttccagggccagagcatctctgtctgggagcttctcttctaccgagaggtgcctgagagtctgcgccaggacctgctgcgtcgctaccaggcaggtgggctcaccgttcatgacgtgaccaccacactcacctcactgctggcccgagccaaggatgggagcccacgtgrggatccacaaggagccctgggcaaggccaccatggaagtaaaacggggtcatctccggggccacgwggtcccagtgtgggacattctgacatccaactatgtgagcagggacacccggaaggagctgctggcccagttcagctctgggtcgctgactctgcccatgctgaagaggagactgaccaccattattgaggaggctgaggagacacaggagtccaagccaaagccgagagacgcctctcttaagcaacaggacactggggccagaggctcagggacctccccagacgagggagatgctcaggacagctccgagagtgccaggcagcaacaggagcagactctgcgtgccaccaccatgcaggtacaccgtgggcagttccgggaccagcaagtttctgtgtggaaagtcctgttctcctcctacctgagtgagacccgccgggaggagctccttgcccagcacttggctggcaagctgggggtaatggaactcgtttccctcctcacccaaatcatcgaggagacagaagaacggctcagcaaggtgtctttccccggcctgaggcgacaggtgtccgcatctgagttgtgtacctctggcatcctggaccgggacaccatgcgagaactggcacagggcaccaagaccattcatgaggtgacagagatggactccgtcaagcgctacctggggggctccagctgcatagcgggcgtcctggtgcccgtccagggagagcctgggcgccaggagaagatgagcatctatcaggccatgtggaagggagtcctgaggccaggcacagccctggtgctgctggaggctcaggcagccacaggcttcatcatcgacccagtgaacaaccgcagactgtctgtggaggaggccgtggctgcaggcgtggtgggaggcgagatccaagagaagctgytgtctgctgagcgtgcggtcaccgggtacacggacccctacaccggggaccagatctccctcttccaggccatgcagagggacctcattgtgagagaccatggcattcgtttgttggaagcccagattgccacgggtggcgtcatcgaccctgtgcacagccaccgtgtgcccgtggacgtggcctaccagcgtggctactttgatgaagacatgaacagcattttggcggaccctggtgacgacaccaagggcttctttgaccccaacactcacgagaacctcacttacctacagctgctgcgccgctgtgtgcgcgacccagagactggcttctacatgctgcagctggctggaaagggctccagtgtgcaccacctgagcgaggagctgagacgggccctgcgtgaagcccgtgtgaccccaggcacgggcgacttccagggccagagcatctctgtctgggagcttctcttctaccgagaggtgcctgagagtctgcgccaggacctgctgcgtcgctaccaggcaggtgggctcaccgttcatgacgtgaccaccacactcacctcactgctggcccgagccaaggatgggagcccacgtgrggatccacaaggagccctgggcaaggccaccatggaagtaaaacggggtcatctccggggccacgwggtcccagtgtgggacattctgacatccaactatgtgagcagggacacccggaaggagctgctggcccagttcagctctgggtcgctgactctgcccatgctgaagaggagactgaccaccattattgaggaggctgaggagacacaggagtccaagccaaagccgagagacgcctctcttaagcaacaggacactggggccagaggctcagggacctccccagacgagggagatgctcaggacagctccgagagtgccaggcagcaacaggagcagactctgcgtgccaccaccatgcaggtacaccgtgggcagttccgggaccagcaagtttctgtgtggaaagtcctgttctcctcctacctgagtgagacccgccgggaggagctccttgcccagcacttggctggcaagctgggggtaatggaactcgtttccctcctcacccaaatcatcgaggagacagaagaacggctcagcaaggtgtctttccccggcctgaggcgacaggtgtccgcatctgagttgtgtacctctggcatcctggaccgggacaccatgcgagaactggcacagggcaccaagaccattcatgaggtgacagagatggactccgtcaagcgctacctggggggctccagctgcatagcgggcgtcctggtgcccgtccagggagagcctgggcgccaggagaagatgagcatctatcaggccatgtggaagggagtcctgaggccaggcacagccctggtgctgctggaggctcaggcagccacaggcttcatcatcgacccagtgaacaaccgcagactgtctgtggaggaggccgtggctgcaggcgtggtgggaggcgagatccaagagaagctgytgtctgctgagcgtgcggtcaccgggtacacggacccctacaccggggaccagatctccctcttccaggccatgcagagggacctcattgtgagagaccatggcattcgtttgttggaagcccagattgccacgggtggcgtcatcgaccctgtgcacagccaccgtgtgcccgtggacgtggcctaccagcgtggctactttgatgaagacatgaacagcattttggcggaccctggtgacgacaccaagggcttctttgaccccaacactcacgagaacctcacttacctacagctgctgcgccgctgtgtgcgcgacccagagactggcttctacatgctgcagctggctggaaagggctccagtgtgcaccacctgagcgaggagctgagacgggccctgcgtgaagcccgtgtgaccccaggcacgggcgacttccagggccagagcatctctgtctgggagcttctcttctaccgagaggtgcctgagagtctgcgccaggacctgctgcgtcgctaccaggcaggtgggctcaccgttcatgacgtgaccaccacactcacctcactgctggcccgagccaaggatgggagcccacgtgrggatccacaaggagccctgggcaaggccaccatggaagtaaaacggggtcatctccggggccacgwggtcccagtgtgggacattctgacatccaactatgtgagcagggacacccggaaggagctgctggcccagttcagctctgggtcgctgactctgcccatgctgaagaggagactgaccaccattattgaggaggctgaggagacacaggagtccaagccaaagccgagagacgcctctcttaagcaacaggacactggggccagaggctcagggacctccccagacgagggagatgctcaggacagctccgagagtgccaggcagcaacaggagcagactctgcgtgccaccaccatgcaggtacaccgtgggcagttccgggaccagcaagtttctgtgtggaaagtcctgttctcctcctacctgagtgagacccgccgggaggagctccttgcccagcacttggctggcaagctgggggtaatggaactcgtttccctcctcacccaaatcatcgaggagacagaagaacggctcagcaaggtgtctttccccggcctgaggcgacaggtgtccgcatctgagttgtgtacctctggcatcctggaccgggacaccatgcgagaactggcacagggcaccaagaccattcatgaggtgacagagatggactccgtcaagcgctacctggggggctccagctgcatagcgggcgtcctggtgcccgtccagggagagcctgggcgccaggagaagatgagcatctatcaggccatgtggaagggagtcctgaggccaggcacagccctggtgctgctggaggctcaggcagccacaggcttcatcatcgacccagtgaacaaccgcagactgtctgtggaggaggccgtggctgcaggcgtggtgggaggcgagatccaagagaagctgytgtctgctgagcgtgcggtcaccgggtacacggacccctacaccggggaccagatctccctcttccaggccatgcagagggacctcattgtgagagaccatggcattcgtttgttggaagcccagattgccacgggtggcgtcatcgaccctgtgcacagccaccgtgtgcccgtggacgtggcctaccagcgtggctactttgatgaagacatgaacagcattttggcggaccctggtgacgacaccaagggcttctttgaccccaacactcacgagaacctcacttacctacagctgctgcgccgctgtgtgcgcgacccagagactggcttctacatgctgcagctggctggaaagggctccagtgtgcaccacctgagcgaggagctgagacgggccctgcgtgaagcccgtgtgaccccaggcacgggcgacttccagggccagagcatctctgtctgggagcttctcttctaccgagaggtgcctgagagtctgcgccaggacctgctgcgtcgctaccaggcaggtgggctcaccgttcatgacgtgaccaccacactcacctcactgctggcccgagccaaggatgggagcccacgtgrggatccacaaggagccctgggcaaggccaccatggaagtaaaacggggtcatctccggggccacgwggtcccagtgtgggacattctgacatccaactatgtgagcagggacacccggaaggagctgctggcccagttcagctctgggtcgctgactctgcccatgctgaagaggagactgaccaccattattgaggaggctgaggagacacaggagtccaagccaaagccgagagacgcctctcttaagcaacaggacactggggccagaggctcagggacctccccagacgagggagatgctcaggacagctccgagagtgccaggcagcaacaggagcagactctgcgtgccaccaccatgcaggtacaccgtgggcagttccgggaccagcaagtttctgtgtggaaagtcctgttctcctcctacctgagtgagacccgccgggaggagctccttgcccagcacttggctggcaagctgggggtaatggaactcgtttccctcctcacccaaatcatcgaggagacagaagaacggctcagcaaggtgtctttccccggcctgaggcgacaggtgtccgcatctgagttgtgtacctctggcatcctggaccgggacaccatgcgagaactggcacagggcaccaagaccattcatgaggtgacagagatggactccgtcaagcgctacctggggggctccagctgcatagcgggcgtcctggtgcccgtccagggagagcctgggcgccaggagaagatgagcatctatcaggccatgtggaagggagtcctgaggccaggcacagccctggtgctgctggaggctcaggcagccacaggcttcatcatcgacccagtgaacaaccgcagactgtctgtggaggaggccgtggctgcaggcgtggtgggaggcgagatccaagagaagctgytgtctgctgagcgtgcggtcaccgggtacacggacccctacaccggggaccagatctccctcttccaggccatgcagagggacctcattgtgagagaccatggcattcgtttgttggaagcccagattgccacgggtggcgtcatcgaccctgtgcacagccaccgtgtgcccgtggacgtggcctaccagcgtggctactttgatgaagacatgaacagcattttggcggaccctggtgacgacaccaagggcttctttgaccccaacactcacgagaacctcacttacctacagctgctgcgccgctgtgtgcgcgacccagagactggcttctacatgctgcagctggctggaaagggctccagtgtgcaccacctgagcgaggagctgagacgggccctgcgtgaagcccgtgtgaccccaggcacgggcgacttccagggccagagcatctctgtctgggagcttctcttctaccgagaggtgcctgagagtctgcgccaggacctgctgcgtcgctaccaggcaggtgggctcaccgttcatgacgtgaccaccacactcacctcactgctggcccgagccaaggatgggagcccacgtgrggatccacaaggagccctgggcaaggccaccatggaagtaaaacggggtcatctccggggccacgwggtcccagtgtgggacattctgacatccaactatgtgagcagggacacccggaaggagctgctggcccagttcagctctgggtcgctgactctgcccatgctgaagaggagactgaccaccattattgaggaggctgaggagacacaggagtccaagccaaagccgagagacgcctctcttaagcaacaggacactggggccagaggctcagggacctccccagacgagggagatgctcaggacagctccgagagtgccaggcagcaacaggagcagactctgcgtgccaccaccatgcaggtacaccgtgggcagttccgggaccagcaagtttctgtgtggaaagtcctgttctcctcctacctgagtgagacccgccgggaggagctccttgcccagcacttggctggcaagctgggggtaatggaactcgtttccctcctcacccaaatcatcgaggagacagaagaacggctcagcaaggtgtctttccccggcctgaggcgacaggtgtccgcatctgagttgtgtacctctggcatcctggaccgggacaccatgcgagaactggcacagggcaccaagaccattcatgaggtgacagagatggactccgtcaagcgctacctggggggctccagctgcatagcgggcgtcctggtgcccgtccagggagagcctgggcgccaggagaagatgagcatctatcaggccatgtggaagggagtcctgaggccaggcacagccctggtgctgctggaggctcaggcagccacaggcttcatcatcgacccagtgaacaaccgcagactgtctgtggaggaggccgtggctgcaggcgtggtgggaggcgagatccaagagaagctgytgtctgctgagcgtgcggtcaccgggtacacggacccctacaccggggaccagatctccctcttccaggccatgcagagggacctcattgtgagagaccatggcattcgtttgttggaagcccagattgccacgggtggcgtcatcgaccctgtgcacagccaccgtgtgcccgtggacgtggcctaccagcgtggctactttgatgaagacatgaacagcattttggcggaccctggtgacgacaccaagggcttctttgaccccaacactcacgagaacctcacttacctacagctgctgcgccgctgtgtgcgcgacccagagactggcttctacatgctgcagctggctggaaagggctccagtgtgcaccacctgagcgaggagctgagacgggccctgcgtgaagcccgtgtgaccccaggcacgggcgacttccagggccagagcatctctgtctgggagcttctcttctaccgagaggtgcctgagagtctgcgccaggacctgctgcgtcgctaccaggcaggtgggctcaccgttcatgacgtgaccaccacactcacctcactgctggcccgagccaaggatgggagcccacgtgrggatccacaaggagccctgggcaaggccaccatggaagtaaaacggggtcatctccggggccacgwggtcccagtgtgggacattctgacatccaactatgtgagcagggacacccggaaggagctgctggcccagttcagctctgggtcgctgactctgcccatgctgaagaggagactgaccaccattattgaggaggctgaggagacacaggagtccaagccaaagccgagagacgcctctcttaagcaacaggacactggggccagaggctcagggacctccccagacgagggagatgctcaggacagctccgagagtgccaggcagcaacaggagcagactctgcgtgccaccaccatgcaggtacaccgtgggcagttccgggaccagcaagtttctgtgtggaaagtcctgttctcctcctacctgagtgagacccgccgggaggagctccttgcccagcacttggctggcaagctgggggtaatggaactcgtttccctcctcacccaaatcatcgaggagacagaagaacggctcagcaaggtgtctttccccggcctgaggcgacaggtgtccgcatctgagttgtgtacctctggcatcctggaccgggacaccatgcgagaactggcacagggcaccaagaccattcatgaggtgacagagatggactccgtcaagcgctacctggggggctccagctgcatagcgggcgtcctggtgcccgtccagggagagcctgggcgccaggagaagatgagcatctatcaggccatgtggaagggagtcctgaggccaggcacagccctggtgctgctggaggctcaggcagccacaggcttcatcatcgacccagtgaacaaccgcagactgtctgtggaggaggccgtggctgcaggcgtggtgggaggcgagatccaagagaagctgytgtctgctgagcgtgcggtcaccgggtacacggacccctacaccggggaccagatctccctcttccaggccatgcagagggacctcattgtgagagaccatggcattcgtttgttggaagcccagattgccacgggtggcgtcatcgaccctgtgcacagccaccgtgtgcccgtggacgtggcctaccagcgtggctactttgatgaagacatgaacagcattttggcggaccctggtgacgacaccaagggcttctttgaccccaacactcacgagaacctcacttacctacagctgctgcgccgctgtgtgcgcgacccagagactggcttctacatgctgcagctggctggaaagggctccagtgtgcaccacctgagcgaggagctgagacgggccctgcgtgaagcccgtgtgaccccaggcacgggcgacttccagggccagagcatctctgtctgggagcttctcttctaccgagaggtgcctgagagtctgcgccaggacctgctgcgtcgctaccaggcaggtgggctcaccgttcatgacgtgaccaccacactcacctcactgctggcccgagccaaggatgggagcccacgtgaggatccacaaggagccctgggcaaggccaccatggaagtaaaacggggtcatctccggggccacgtggtcccagtgtgggacattctgacatccaactatgtgagcagggacacccggaaggagctgctggcccagttcagctctgggtcgctgactctgcccatgctgaagaggagactgaccaccattattgaggaggctgaggagacacaggagtccaagccaaagccgagagacgcctctcttaagcaacaggacactggggccagaggctcagggacctccccagacgagggagatgctcaggacagctccgagagtgccaggcagcaacaggagcagactctgcgtgccaccaccatgcaggtacaccgtgggcagttccgggaccagcaagtttctgtgtggaaagtcctgttctcctcctacctgagtgagacccgccgggaggagctccttgcccagcacttggctggcaagctgggggtaatggaactcgtttccctcctcacccaaatcatcgaggagacagaagaacggctcagcaaggtgtctttccccggcctgaggcgacaggtgtccgcatctgagttgtgtacctctggcatcctggaccgggacaccatgcgagaactggcacagggcaccaagaccattcatgaggtgacagagatggactccgtcaagcgctacctggggggctccagctgcatagcgggcgtcctggtgcccgtccagggagagcctgggcgccaggagaagatgagcatctatcaggccatgtggaagggagtcctgaggccaggcacagccctggtgctgctggaggctcaggcagccacaggcttcatcatcgacccagtgaacaaccgcagactgtctgtggaggaggccgtggctgcaggcgtggtgggaggcgagatccaagagaagctgctgtctgctgagcgtgcggtcaccgggtacacggacccctacaccggggaccagatctccctcttccaggccatgcagagggacctcattgttaagaaccatggtattcgactgctggaagcccagattgccacaggtggcgtcatcgatcctgtgcacagccaccgtgtgcccgtggacgtggcctaccagcgtggctactttgatcaagagatgaacagcattttggcagaccctggtgacgacaccaagggcttctttgatcccaacactcatgagaacctcacttacctacagcttctgcagagagctacaattgaccctgagacgggattattgtttctctccctctctaagggctgattttctttttgtaaggttctgagactttatggaaggtacctctgcattctcataaaccctgactctgatccttaaattccctctctcctttcagctcctgtttttcagggtaggttatgttcttttccctttccctgcctgcttctgattggtaattttgtgtcctgtacctgttctcccgcttttctccttgtttttttttttttttcctcctctaaaattttcttatgttgattcttatgactgttttctgttcttgcaacatgaggtcagagggagccttttgtttttgttttgttggtttttttttgttttttgttttttttgttttttgttttttgttttttctgagacagggtttctctgctacagctttgattgtcctggtactcactctgttgaacagtctggtgtcattctcagagattcatctgcttcctcctctggaggactgggattaagggcatgtgccatcgctgctcagccaaggaagtggtctttgaattgagcacagcaatccttcaccttgtagtgtacaccagtctcagagtgaatggcaatcttttctattggtttcccaagcactgggattgcaagcataaagcaccatgcttggccaagatcttcaaagattttcaattcatggccactttgtacatggtgtgtcttgatttgccctctgtgttaggaataatgtcgctcatcttttctccatgtacctctgagacatcccacaggtcggtgtattacaactcagggtattacaacttttcgtgtcttcatgtcttttgataataaatgaattttccgctcttaaaaaaaaaaaaaaaaaaaaaaaaaaaaaaaa

SEQ ID NO: 136 - protein, 6548 aa, Mus musculus
  misc_feature (3026)..(3026): The 'Xaa' at location 3026 stands for Gly, or Glu.
  misc_feature (3048)..(3048): The 'Xaa' at location 3048 stands for Glu, or Val.
  misc_feature (3339)..(3339): The 'Xaa' at location 3339 stands for Leu.
  misc_feature (3541)..(3541): The 'Xaa' at location 3541 stands for Gly, or Glu.
  misc_feature (3563)..(3563): The 'Xaa' at location 3563 stands for Glu, or Val.
  misc_feature (3854)..(3854): The 'Xaa' at location 3854 stands for Leu.
  misc_feature (4056)..(4056): The 'Xaa' at location 4056 stands for Gly, or Glu.
  misc_feature (4078)..(4078): The 'Xaa' at location 4078 stands for Glu, or Val.
  misc_feature (4369)..(4369): The 'Xaa' at location 4369 stands for Leu.
  misc_feature (4571)..(4571): The 'Xaa' at location 4571 stands for Gly, or Glu.
  misc_feature (4593)..(4593): The 'Xaa' at location 4593 stands for Glu, or Val.
  misc_feature (4884)..(4884): The 'Xaa' at location 4884 stands for Leu.
  misc_feature (5086)..(5086): The 'Xaa' at location 5086 stands for Gly, or Glu.
  misc_feature (5108)..(5108): The 'Xaa' at location 5108 stands for Glu, or Val.
  misc_feature (5399)..(5399): The 'Xaa' at location 5399 stands for Leu.
  misc_feature (5601)..(5601): The 'Xaa' at location 5601 stands for Gly, or Glu.
  misc_feature (5623)..(5623): The 'Xaa' at location 5623 stands for Glu, or Val.
  misc_feature (5914)..(5914): The 'Xaa' at location 5914 stands for Leu.
MNGQAPPHDVVVANGTEKFIVPKIKKNQLGASTPSRPQAEAALPTTARSIAGVYVEASGQTQSIYAAIKQGLLPTGLGLTLLEAQAATGGLVDLAQGQLLPVSEALRRGLVGLELKEKLLAAERAVTGYPDPYGGEKLSLFQAIKKEVVDRTLGWRLLEAQLATGGLVDPTQGVQVAPELACQQGLLDKETWLSLVESEPSMGTPGFSDPNTLEQLPYSVLLGRCVQDPSSGLPLLPLKTTFHTLAGAASASMLLEAGVLNEEMVRDLQEGMLVVSDVGTRPEVRRYLEGTGGLAGVVLLPGGHKKSFFQATVEHLVSKGIALQLLEAQAATRTLVHPTTGQRLWVEEAVKAGLVGPELHEQLLVAEQAVTGYYDPFSSSRIPVFQAMKKGLVDQPLALRLLDAQLATGGLICPARRFRLPLEAALRFGCLDEETRQRLSQAMGFSDPTTHDRLGYEQLLALSVTDPETGLAFLPLPGMSHANEPQGPTFIDHCTRQALSKATTSISVGRYQGRPVSLWELLFSESVPVKKRAMLAQRHQEGALSVEELAAELKNIVEQAAATAKVTFAGLRDTVTPGELLKAEIINQDLFEQLERGQTSAQDVGSLDSVQRYLQGTGSIAGLLLPDSQERLSIYEARSKGLLRPGTALILLEAQAATGFIIDPKENKRYSVEEALRAGVIGPDVYAKLLSAEHAVTGYTDPYSGEQISLFQAMQRDLIVRDHGIRLLEAQIATGGVIDPVHSHRVPVDVAYQRGYFDQILNSILLDPSDDTKGFFDPNTHENLTYLQLLERCVHDSETGLHLLPLSSTRPQLVDSSTRQAFQKLLLSVKYGRFRGQRVSAWELVNSEYFTEDRRRQLLQRYRQRKITLEQVTQLLEKEMRRWTDITLPALQGQVTAYQLLEAHIINQELLDQVLTGTISPDALLQVGDVHRYLRGSGTVGGVLLKPSNQRISLYQAMKQKLLPPSTALALLEAQAATGTITDPCSMETLSVDEAVCRGVVGAEVYGKLKRAEHSITGYRDPFSGKKVSLFRAMKKGLVPVEQATRLLEAQVSTGGVVDPTTHLHLPMPVAVQRGCIDREMEAALSRSPETFPTPDGRGHTSYAQLLEHCLQDKASGLHLLPLTEDAPNVPTDTQIQETLQASAGTEDGLSLWDLLTSCHFTEEQRRGYLEDVKVGKISVPQLQNTVRSWVHSAKLLARARITVPGPRGEVPATWLRDAGIITQETLEALAQGMQSPDEVAKQPTVKVCLWGTGCVAGVLLQPSGTKLSIAQAVRDGLLPTGLGQQLLEAQVASGFLVNPLTNQRLSVEGAVKAGLVGMEQSEHLRQVEKAVTGYSDPFSGGSLSLWQAMEKGLVTQSEAFPLLQVQLATGGVVDPVHGVHLPQEVAYKLGLLDEQTSRVLTATGKENKLFFDPNSREKVTYQQLRELCVLDADTGLWLLPLPQGTVLEVDDHTAVALRAMKVPINMGRFQGHSVSLWDLLHSEYVGAEKRRELVALCCSGRAAALRQVIGMLTTLVEAAEKQPSQATFKGLRKQVSAGDLFRSQLITKQTLDELNQGKRTVQEVTEMDSVRRSLEGGNFIAGVLIQDTKEKMSIPEALRRHILRPGTALVLLEAQAATGFIIDPVENRKLTVEQAFQAGMFGKETYMKLLSAERAVTGYTDPYTGEQISLFQAMQRDLIVRDHGIRLLEAQIATGGIIDPVHSHRVPVDVAYQRGYFNEEMNRILSDPSDDTKGFFDPNTHENLTYLQLLERCVEDPETGLYMLEIVKKGETYTYIDEATRQALTSRTVKMYVGKFAGQTVSVWDLLSSQYFTEGRRRKLLREYRAQNIGLENLLEVITSTVEETEKQSQIFKVPGIHGDVTAAELFNSGILNKKTLDALRSGDRGFQDLRWLEDVRVYLEGSNYIAGVIAPLTQKVMSFYEASREELIPAGFAAQMLEAQAATGYLMDPCTNQRLCVDEAIAAGLVGEDLRERLVNAEMAAKGYKDPATGETIPLYQAMERKLVGREEALRLLEVQVATGGVIDPRHHHRVPLDTACQRGCMCDDSLVLIADQKHMRKRFVDPNTQEKVTYQELQDRCQREEKSGWALFPVVKDKKDIEYVDEATKRALEAEQVEVTVGRYRGQRRSVWELLNSEYVSEEKKMELVRLYKEDTTRALQKVVELILQMIADKERRSRQLWFRGLRTQVTAEELLRSEVITKQTLEDLEEGRTTVDQIERKEDVKRYLKGTSCIAGVLVPVQGEPGRQEKMSIYQAMWKGVLRPGTALVLLEAQAATGFIIDPVNNRRLSVEEAVAAGVVGGEIQEKLLSAERAVTGYTDPYTGDQISLFQAMQRDLIVRDHGIRLLEAQIATGGVIDPVHSHRVPVDVAYQRGYFDEDMNSILADPGDDTKGFFDPNTHENLTYLQLLRRCVRDPETGFYMLQLAGKGSSVHHLSEELRRALREARVTPGTGDFQGQSISVWELLFYREVPESLRQDLLRCYQAGGLTVHDVTTTLTSLLARAKDGSPRGDPQGALGKATMEVKRGHLRGHEVPVWDILTSNYVSRDTRKELLAQFSSGSLTLPMLKRRLTTIIEEAEETQESKPKPRDASLKQQDTGARGSGTSPDEGDAQDSSESARQQQEQTLRATTMQVHRGQFRDQQVSVWKVLFSSYLSETRREELLAQHLAGKLGVMELVSLLTQIIEETEERLSKVSFPGLRRQVSASELCTSGILDRDTMRELAQGTKTIHEVTEMDSVKRYLGGSSCIAGVLVPVQGEPGRQEKMSIYQAMWKGVLRPGTALVLLEAQAATGFIIDPVNNRRLSVEEAVAAGVVGGEIQEKLLSAERAVTGYTDPYTGDQISLFQAMQRDLIVRDHGIRLLEAQIATGGVIDPVHSHRVPVDVAYQRGYFDEDMNSILADPGDDTKGFFDPNTHENLTYLQLLRRCVRDPETGFYMLQLAGKGSSVHHLSEELRRALREARVTPGTGDFQGQSISVWELLFYREVPESLRQDLLRRYQAGGLTVHDVTTTLTSLLARAKDGSPRXDPQGALGKATMEVKRGHLRGHXVPVWDILTSNYVSRDTRKELLAQFSSGSLTLPMLKRRLTTIIEEAEETQESKPKPRDASLKQQDTGARGSGTSPDEGDAQDSSESARQQQEQTLRATTMQVHRGQFRDQQVSVWKVLFSSYLSETRREELLAQHLAGKLGVMELVSLLTQIIEETEERLSKVSFPGLRRQVSASELCTSGILDRDTMRELAQGTKTIHEVTEMDSVKRYLGGSSCIAGVLVPVQGEPGRQEKMSIYQAMWKGVLRPGTALVLLEAQAATGFIIDPVNNRRLSVEEAVAAGVVGGEIQEKLXSAERAVTGYTDPYTGDQISLFQAMQRDLIVRDHGIRLLEAQIATGGVIDPVHSHRVPVDVAYQRGYFDEDMNSILADPGDDTKGFFDPNTHENLTYLQLLRRCVRDPETGFYMLQLAGKGSSVHHLSEELRRALREARVTPGTGDFQGQSISVWELLFYREVPESLRQDLLRRYQAGGLTVHDVTTTLTSLLARAKDGSPRXDPQGALGKATMEVKRGHLRGHXVPVWDILTSNYVSRDTRKELLAQFSSGSLTLPMLKRRLTTIIEEAEETQESKPKPRDASLKQQDTGARGSGTSPDEGDAQDSSESARQQQEQTLRATTMQVHRGQFRDQQVSVWKVLFSSYLSETRREELLAQHLAGKLGVMELVSLLTQIIEETEERLSKVSFPGLRRQVSASELCTSGILDRDTMRELAQGTKTIHEVTEMDSVKRYLGGSSCIAGVLVPVQGEPGRQEKMSIYQAMWKGVLRPGTALVLLEAQAATGFIIDPVNNRRLSVEEAVAAGVVGGEIQEKLXSAERAVTGYTDPYTGDQISLFQAMQRDLIVRDHGIRLLEAQIATGGVIDPVHSHRVPVDVAYQRGYFDEDMNSILADPGDDTKGFFDPNTHENLTYLQLLRRCVRDPETGFYMLQLAGKGSSVHHLSEELRRALREARVTPGTGDFQGQSISVWELLFYREVPESLRQDLLRRYQAGGLTVHDVTTTLTSLLARAKDGSPRXDPQGALGKATMEVKRGHLRGHXVPVWDILTSNYVSRDTRKELLAQFSSGSLTLPMLKRRLTTIIEEAEETQESKPKPRDASLKQQDTGARGSGTSPDEGDAQDSSESARQQQEQTLRATTMQVHRGQFRDQQVSVWKVLFSSYLSETRREELLAQHLAGKLGVMELVSLLTQIIEETEERLSKVSFPGLRRQVSASELCTSGILDRDTMRELAQGTKTIHEVTEMDSVKRYLGGSSCIAGVLVPVQGEPGRQEKMSIYQAMWKGVLRPGTALVLLEAQAATGFIIDPVNNRRLSVEEAVAAGVVGGEIQEKLXSAERAVTGYTDPYTGDQISLFQAMQRDLIVRDHGIRLLEAQIATGGVIDPVHSHRVPVDVAYQRGYFDEDMNSILADPGDDTKGFFDPNTHENLTYLQLLRRCVRDPETGFYMLQLAGKGSSVHHLSEELRRALREARVTPGTGDFQGQSISVWELLFYREVPESLRQDLLRRYQAGGLTVHDVTTTLTSLLARAKDGSPRXDPQGALGKATMEVKRGHLRGHXVPVWDILTSNYVSRDTRKELLAQFSSGSLTLPMLKRRLTTIIEEAEETQESKPKPRDASLKQQDTGARGSGTSPDEGDAQDSSESARQQQEQTLRATTMQVHRGQFRDQQVSVWKVLFSSYLSETRREELLAQHLAGKLGVMELVSLLTQIIEETEERLSKVSFPGLRRQVSASELCTSGILDRDTMRELAQGTKTIHEVTEMDSVKRYLGGSSCIAGVLVPVQGEPGRQEKMSIYQAMWKGVLRPGTALVLLEAQAATGFIIDPVNNRRLSVEEAVAAGVVGGEIQEKLXSAERAVTGYTDPYTGDQISLFQAMQRDLIVRDHGIRLLEAQIATGGVIDPVHSHRVPVDVAYQRGYFDEDMNSILADPGDDTKGFFDPNTHENLTYLQLLRRCVRDPETGFYMLQLAGKGSSVHHLSEELRRALREARVTPGTGDFQGQSISVWELLFYREVPESLRQDLLRRYQAGGLTVHDVTTTLTSLLARAKDGSPRXDPQGALGKATMEVKRGHLRGHXVPVWDILTSNYVSRDTRKELLAQFSSGSLTLPMLKRRLTTIIEEAEETQESKPKPRDASLKQQDTGARGSGTSPDEGDAQDSSESARQQQEQTLRATTMQVHRGQFRDQQVSVWKVLFSSYLSETRREELLAQHLAGKLGVMELVSLLTQIIEETEERLSKVSFPGLRRQVSASELCTSGILDRDTMRELAQGTKTIHEVTEMDSVKRYLGGSSCIAGVLVPVQGEPGRQEKMSIYQAMWKGVLRPGTALVLLEAQAATGFIIDPVNNRRLSVEEAVAAGVVGGEIQEKLXSAERAVTGYTDPYTGDQISLFQAMQRDLIVRDHGIRLLEAQIATGGVIDPVHSHRVPVDVAYQRGYFDEDMNSILADPGDDTKGFFDPNTHENLTYLQLLRRCVRDPETGFYMLQLAGKGSSVHHLSEELRRALREARVTPGTGDFQGQSISVWELLFYREVPESLRQDLLRRYQAGGLTVHDVTTTLTSLLARAKDGSPRXDPQGALGKATMEVKRGHLRGHXVPVWDILTSNYVSRDTRKELLAQFSSGSLTLPMLKRRLTTIIEEAEETQESKPKPRDASLKQQDTGARGSGTSPDEGDAQDSSESARQQQEQTLRATTMQVHRGQFRDQQVSVWKVLFSSYLSETRREELLAQHLAGKLGVMELVSLLTQIIEETEERLSKVSFPGLRRQVSASELCTSGILDRDTMRELAQGTKTIHEVTEMDSVKRYLGGSSCIAGVLVPVQGEPGRQEKMSIYQAMWKGVLRPGTALVLLEAQAATGFIIDPVNNRRLSVEEAVAAGVVGGEIQEKLXSAERAVTGYTDPYTGDQISLFQAMQRDLIVRDHGIRLLEAQIATGGVIDPVHSHRVPVDVAYQRGYFDEDMNSILADPGDDTKGFFDPNTHENLTYLQLLRRCVRDPETGFYMLQLAGKGSSVHHLSEELRRALREARVTPGTGDFQGQSISVWELLFYREVPESLRQDLLRRYQAGGLTVHDVTTTLTSLLARAKDGSPREDPQGALGKATMEVKRGHLRGHVVPVWDILTSNYVSRDTRKELLAQFSSGSLTLPMLKRRLTTIIEEAEETQESKPKPRDASLKQQDTGARGSGTSPDEGDAQDSSESARQQQEQTLRATTMQVHRGQFRDQQVSVWKVLFSSYLSETRREELLAQHLAGKLGVMELVSLLTQIIEETEERLSKVSFPGLRRQVSASELCTSGILDRDTMRELAQGTKTIHEVTEMDSVKRYLGGSSCIAGVLVPVQGEPGRQEKMSIYQAMWKGVLRPGTALVLLEAQAATGFIIDPVNNRRLSVEEAVAAGVVGGEIQEKLLSAERAVTGYTDPYTGDQISLFQAMQRDLIVKNHGIRLLEAQIATGGVIDPVHSHRVPVDVAYQRGYFDQEMNSILADPGDDTKGFFDPNTHENLTYLQLLQRATIDPETGLLFLSLSKG

SEQ ID NO: 137 - DNA, 3519 bp, Mus musculus
  CDS (1)..(3519)
  Misc_Feature (620)..(620): y at position 620 is t or c
atgactggacagtgctgtgaggagttgcagagagccccgaagcccagggtggcactgagaaccaagaaaggattgaaagggtccattgaggatgtccttggagacctcctgggagatgacacaacaccacctgagaagcctgctgagccagcttcccatgccaaagacacagcgagctcacctcagtggcaggcttcaaaggcaaagttcctcccaaaagacagcgttgaaggactggcaggagctgatgctgaggcctccagcgtctcggatgcagacccacaggtcttcctgcagaacatgaaggacttggacagcatggacgatgatctctttggtcggataaagtctcaccagccctccggcaaaggagctgcaaagggtcctgggaaagaaggacctagcaatcacaagcctgctggcacattaacagctaatgagaaagggtacaccatgcccactaagaagccaccaccatcttccagcaagactgggcttcagtataagaagttctcctttgaagactttgaagacccactggcaggacttctctctgatgaggaagaagaaaccgccacgaagctgcctgcagtggagaggaaacctgctcccaagagccygggcgcagcagcaggccaaggtccttctgttcctctgacccctggggatacgcccatcaggaagaaagaactgctctttgatgaaggggatgacatcatgactactctgggctttgaagacagccccaaggcagagaggaagaagacaggagaccaggaagggccactccctgctcgctccaagctggatgaactgctgggtcggggtacagcagccaagctcctcactcgcccaggcactggggaacgcagagagttccagttagacaagaagtatcagaagatgggaggggaggagtctgtaccagctagagacaaggaagacagctgggatgacgagaccctcacctttggggcttacaagcctaccgtggcctcctctgagggccgccagtcccgcaggcagtcagtcagcaggttcttgggagaaggaggcccagaccctaagggagaaagcctaggcttcaaacagagctctccaccagcctccagtcctatccaccccaggaaaggaggagctgactggttaggccttaaggacaatgacctggacctgctgtctccctctcctgttcaaaaggcccaacaggaagactcacccatgacaccctctctcctgcctcctacaaaccagccctcagccccagagccacagtctgccccaactggacttccctcagcagcaaagccaccagccaagggtgcaagaccctctctcaaagccagccaggcctcctcaccaaaagcatctgaggagaaagaagatgactggttaagccatgtcatatctcagaagaaatcccaaaatctagccagagaagagcgtgcggggccccctaaggacctggcctcgctggggtcactgggtcagaccccttctggcagcctgcctgttgctcaggtccttgagcaggcccctgctggagaagcctcgaaaccaactacacaaggaatggcggctgtcaggcctggtgtcacagggtcctccatgagttggagccaagccactactgttctccctgtagatgaccccaagaaaggagcagcctctgcctctggggacttctctagcagagagcctgcggtttacattccacactcccaggaacctacggggctctctgtgcctatccagaccctcctcccagagtccatgatgcagagtctgctgccaggctcaggataccagaagcagctcctggccgcccaggggcagctgcagagtagcactgcccagcttcaggttgagctgctgcagagccagaccaagctgtcagagctggaggcccaggtgcgcaagttggagctggagcgggcccagcacaggatgctgctggagagtttgcagcagcgacaccaggcagacctggagctcatcgaggatgcacatagaagccgtatcaaggtgctagaaacatcctaccagcagcgggaggagcagctgcgcagagagaaggaggtgctatcagctcagcatgcgtcatattgccgagaagctgagcaggccagggctgagctcgtagcccagcaccagcggcagatggccatggctgaacaggagagggaccaggaggttgcccggctccgggagcttcagcaggcatccatcctggagatgcgcaaggatcatgagcaccagctgcagcggctgaagatgctgaaggaccaggagattgatgctgtcaccagcgctacctcccatactcggtccctgaatggcatcatcgagcagatggagaagttttccagcagcttgaacacgctgtcctcccgcgtggaggcctcgcaccttaccacctcacagcaacgagagctggggattcggcagcaagatgagcaattgcgagctctgcaggagcggctgggccgacagcagcgagacatggaggaagagcggaacaggctacaggaggtcatcgggaagatggaagtacgcctgagtgagcagagccggctcctggaacaggaacgttggcgggtggccgccgagaagactaaggcagagtcagcccagcgcactctggaggagcaaaggaagatcatggtccagcagattgccatggagagggaggagctggagagagccaagagcgccttgctggaggagcagaagtcagtcatgaataagtgtggggaggagcggcggcgcctggcagcagagtgggctgagtatttcacacagcagaagctgagtaaggaacgggcggagcgtgaggctgagagggcgatgcatgcagactcccagcgggagggcaccatcatcagcctgaccaaggagcaggcggagctgacagttagggcctgtgagctccgggccaaggaggagaagctgcttgctgagagggaggctttggagagagagcgccaagagctccggctggagaaggacaggttacacaaagccagcctgcgcctgcaggcccgtgcacaggaggtggaacacatgagtaaggtagcctccaagaaatacgaggagggggagcaggccttgcaggaggcgcagcagatgcagaatgagcagcagggccggctgcaggtggtccagcggcagcaggagtggctgcggcagcaggagcaacgtgtgcaccaggagcacctgagcctggcacagcagaggctgcagctggaccgcgtgcggcaggaagtgcctgctagccttccggggctgccccccagggttcagggcccggcagcctccagccgggatgctgtccaggcccccgcttccagcagtcctcagtgtagccagccagctgctgcccaggtgcccacacaccttcttgccaagctgctgctgctaaagcatacagcagaagaggaccacgacttcttggagaatgaacagttcttcctggagactctgaagaaagcaccctataatatggcgtaccattctgcc

SEQ ID NO: 138 - protein, 1173 aa, Mus musculus
  misc_feature (207)..(207): The 'Xaa' at location 207 stands for Pro, or Leu.
MTGQCCEELQRAPKPRVALRTKKGLKGSIEDVLGDLLGDDTTPPEKPAEPASHAKDTASSPQWQASKAKFLPKDSVEGLAGADAEASSVSDADPQVFLQNMKDLDSMDDDLFGRIKSHQPSGKGAAKGPGKEGPSNHKPAGTLTANEKGYTMPTKKPPPSSSKTGLQYKKFSFEDFEDPLAGLLSDEEEETATKLPAVERKPAPKSXGAAAGQGPSVPLTPGDTPIRKKELLFDEGDDIMTTLGFEDSPKAERKKTGDQEGPLPARSKLDELLGRGTAAKLLTRPGTGERREFQLDKKYQKMGGEESVPARDKEDSWDDETLTFGAYKPTVASSEGRQSRRQSVSRFLGEGGPDPKGESLGFKQSSPPASSPIHPRKGGADWLGLKDNDLDLLSPSPVQKAQQEDSPMTPSLLPPTNQPSAPEPQSAPTGLPSAAKPPAKGARPSLKASQASSPKASEEKEDDWLSHVISQKKSQNLAREERAGPPKDLASLGSLGQTPSGSLPVAQVLEQAPAGEASKPTTQGMAAVRPGVTGSSMSWSQATTVLPVDDPKKGAASASGDFSSREPAVYIPHSQEPTGLSVPIQTLLPESMMQSLLPGSGYQKQLLAAQGQLQSSTAQLQVELLQSQTKLSELEAQVRKLELERAQHRMLLESLQQRHQADLELIEDAHRSRIKVLETSYQQREEQLRREKEVLSAQHASYCREAEQARAELVAQHQRQMAMAEQERDQEVARLRELQQASILEMRKDHEHQLQRLKMLKDQEIDAVTSATSHTRSLNGIIEQMEKFSSSLNTLSSRVEASHLTTSQQRELGIRQQDEQLRALQERLGRQQRDMEEERNRLQEVIGKMEVRLSEQSRLLEQERWRVAAEKTKAESAQRTLEEQRKIMVQQIAMEREELERAKSALLEEQKSVMNKCGEERRRLAAEWAEYFTQQKLSKERAEREAERAMHADSQREGTIISLTKEQAELTVRACELRAKEEKLLAEREALERERQELRLEKDRLHKASLRLQARAQEVEHMSKVASKKYEEGEQALQEAQQMQNEQQGRLQVVQRQQEWLRQQEQRVHQEHLSLAQQRLQLDRVRQEVPASLPGLPPRVQGPAASSRDAVQAPASSSPQCSQPAAAQVPTHLLAKLLLLKHTAEEDHDFLENEQFFLETLKKAPYNMAYHSA

SEQ ID NO: 139 - DNA, 4683 bp, Streptococcus mutans
  CDS (1)..(4683)
atgaaagtcaaaaaaacttacggttttcgtaaaagtaaaattagtaaaacactgtgtggtgctgttctaggaacagtagcagcagtctctgtagcaggacaaaaggtttttgccgatgaaacgaccactactagtgatgtagatactaaagtagttggaacacaaactggaaatccagcgaccaatttgccagaggctcaaggaagtgcgagtaagcaagctgaacaaagtcaaaccaagctggagagacaaatggttcataccattgaagtacctaaaactgatcttgatcaagcagcaaaagatgctaagtctgctggtgtcaatgttgtccaagatgccgatgttaataaaggaactgttaaaacagctgaagaagcagtccaaaaagaaactgaaattaaagaagattacacaaaacaagctgaggatattaagaagacaacagatcaatataaatcggatgtagctgctcatgaggcagaagttgctaaaatcaaagctaaaaatcaggcaactaaagaacagtatggaaaagatatggtagctcataaagccgaggttgaacgcattaatgctgcaaatgctgccagtaaaacagcttatgaagctaaattggctcaatatcaagcagatttagcagccgttcaaaaaaccaatgctgccaatcaagcatcctatcaaaaagcccttgctgcttatcaggctgaactgaaacgtgttcaggaagctaatgcagccgccaaagccgcttatgatactgctgtagcagcaaataatgccaaaaatacagaaattgccgctgccaatgaagaaattagaaaacgcaatgcaacggccaaagctgaatatgagactaagttagctcaatatcaagctgaactaaagcgtgttcaggaagctaatgccgcaaacgaagcagactatcaagctaaattgaccgcctatcaaacagagcttgctcgcgttcagaaagccaatgcagatgctaaagcggcctatgaagcagctgtagcagcaaataatgccaaaaatgcggcacttacagctgaaaatactgcaattaagcaacgcaatgagaatgctaaggcgacttatgaagctgcactcaagcaatatgaggctgatttggcagcggtgaaaaaagctaatgccgcaaacgaagcagactatcaagctaaattgaccgcctatcaaacagagctcgctcgcgttcaaaaggccaatgcggatgctaaagcggcctatgaagcagctgtagcagcaaataatgccgcaaatgcagcgctcacagctgaaaatactgcaattaagaagcgcaatgcggatgctaaagctgattacgaagcaaaacttgctaagtatcaagcagatcttgccaaatatcaaaaagatttagcagactatccagttaagttaaaggcatacgaagatgaacaagcttctattaaagctgcactggcagaacttgaaaaacataaaaatgaagacggaaacttaacagaaccatctgctcaaaatttggtctatgatcttgagccaaatgcgaacttatctttgacaacagatgggaagttccttaaggcttctgctgtggatgatgcttttagcaaaagcacttcaaaagcaaaatatgaccaaaaaattcttcaattagatgatctagatatcactaacttagaacaatctaatgatgttgcttcttctatggagctttatggcaattttggtgataaagctggctggtcaacgacagtaagcaataactcacaggttaaatggggatcggtacttttagagcgcggtcaaagcgcaacagctacatacactaacctgcagaattcttattacaatggtaaaaagatttctaaaattgtctacaagtatacagtggaccctaagtccaagtttcaaggtcaaaaggtttggttaggtatttttaccgatccaactttaggtgtttttgcttccgcttatacaggtcaagttgaaaaaaacacttctatttttattaaaaatgaattcactttctatgacgaagatggaaaaccaattaattttgataatgcccttctatcagtagcttctcttaaccgagaaaataattctattgagatggccaaagattatacgggtaaatttgtcaaaatctctggatcatctatcggtgaaaagaatggcatgatttatgctacagatactctcaactttaggcagggtcaaggtggtgctcgttggaccatgtataccagagctagcgaaccgggatctggctgggatagttcagatgcgcctaactcttggtatggtgctggtgctatccgcatgtctggtcctaataacagtgtgactttgggtgctatctcatcaacacttgttgtgcctgctgatcctacaatggcaattgaaaccggcaaaaaaccaaatatttggtattcattaaatggtaaaatccgtgcggttaatcttcctaaagttactaaggaaaaacccacacctccggttaaaccaacagctccaactaaaccaacttatgaaacagaaaagccattaaaaccggcaccagtagctccaaattatgaaaaggagccaacaccaccgacaagaacaccggatcaagcagagccaaagaaacccactccgccgacctatgaaacagaaaagccgttggagccagcacctgttgagccaagctatgaagcagagccaacaccgccgacaaggacaccggatcaggcagagccaaataaacccacaccgccgacctatgaaacagaaaagccgttggagccagcacctgttgagccaagctatgaagcagagccaacgccaccgacaccaacaccagatcaaccagaaccaaacaaacctgttgagccaacttatgaggttattccaacaccgccgactgatcctgtttatcaagatcttccaacacctccatctataccaactgttcatttccattactttaaactagctgttcagccgcaggttaacaaagaaattagaaacaataacgatgttaatattgacagaactttggtggctaaacaatctgttgttaagttccagctgaagacagcagatctccctgctggacgtgatgaaacaacttcctttgtcttggtagatcccctgccatctggttatcaatttaatcctgaagctacaaaagctgccagccctggctttgatgtcgcttatgataatgcaactaatacagtcaccttcaaggcaactgcagcaactttggctacgtttaatgctgatttgactaagtcagtggcaacgatttatccaacagtggtcggacaagttcttaatgatggcgcaacttataagaataatttctcgctcacagtcaatgatgcttatggcattaaatccaatgttgttcgggtgacaactcctggtaaaccaaatgatccagataacccaaataataattacattaagccaactaaggttaataaaaatgaaaatggcgttgttattgatggtaaaacagttcttgccggttcaacgaattattatgagctaacttgggatttggatcaatataaaaacgaccgctcttcagcagataccattcaacaaggattttactatgtagatgattatccagaagaagcgcttgaattgcgtcaggatttagtgaagattacagatgctaatggcaatgaagttactggtgttagtgtggataattatactagtcttgaagcagcccctcaagaaattagagatgttctttctaaggcaggaattagacctaaaggtgctttccaaattttccgtgccgataatccaagagaattttatgatacttatgtcaaaactggaattgatttgaagattgtatcaccaatggttgttaaaaaacaaatgggacaaacaggcgggagttatgaagatcaagcttaccaaattgactttggtaatggttatgcatcaaatatcgttatcaataatgttcctaagattaaccctaagaaagatgtgaccttaacacttgatccggctgatacaaataatgttgatggtcagactattccacttaatacagtctttaattaccgtttgattggtggcattatccctgcaaatcactcagaagaactctttgaatacaatttctatgatgattatgatcaaacaggagatcactatactggtcagtataaagtttttgccaaggttgatatcactcttaaaaacggtgttattatcaagtcaggtactgagttaactcagtatacgacagcggaagttgataccactaaaggtgctatcacaattaagttcaaggaagcctttctgcgttctgtttcaattgattcagccttccaagctgaaagttatatccaaatgaaacgtattgcggttggtacttttgaaaatacctatattaatactgtcaatggggtaacttacagttcaaatacagtgaaaacaactactcctgaggatcctgcagaccctactgatccgcaagatccatcatcaccgcggacttcaactgtaattatctacaaacctcaatcaactgcttatcaaccaagctctgtccaaaaaacgttaccaaatacgggagtaacaaacaatgcttatatgcctttacttggtattattggcttagttactagttttagtttgcttggcttaaaggctaagaaagat

SEQ ID NO: 140 - protein, 1561 aa, Streptococcus mutans
MKVKKTYGFRKSKISKTLCGAVLGTVAAVSVAGQKVFADETTTTSDVDTKVVGTQTGNPATNLPEAQGSASKQAEQSQTKLERQMVHTIEVPKTDLDQAAKDAKSAGVNVVQDADVNKGTVKTAEEAVQKETEIKEDYTKQAEDIKKTTDQYKSDVAAHEAEVAKIKAKNQATKEQYGKDMVAHKAEVERINAANAASKTAYEAKLAQYQADLAAVQKTNAANQASYQKALAAYQAELKRVQEANAAAKAAYDTAVAANNAKNTEIAAANEEIRKRNATAKAEYETKLAQYQAELKRVQEANAANEADYQAKLTAYQTELARVQKANADAKAAYEAAVAANNAKNAALTAENTAIKQRNENAKATYEAALKQYEADLAAVKKANAANEADYQAKLTAYQTELARVQKANADAKAAYEAAVAANNAANAALTAENTAIKKRNADAKADYEAKLAKYQADLAKYQKDLADYPVKLKAYEDEQASIKAALAELEKHKNEDGNLTEPSAQNLVYDLEPNANLSLTTDGKFLKASAVDDAFSKSTSKAKYDQKILQLDDLDITNLEQSNDVASSMELYGNFGDKAGWSTTVSNNSQVKWGSVLLERGQSATATYTNLQNSYYNGKKISKIVYKYTVDPKSKFQGQKVWLGIFTDPTLGVFASAYTGQVEKNTSIFIKNEFTFYDEDGKPINFDNALLSVASLNRENNSIEMAKDYTGKFVKISGSSIGEKNGMIYATDTLNFRQGQGGARWTMYTRASEPGSGWDSSDAPNSWYGAGAIRMSGPNNSVTLGAISSTLVVPADPTMAIETGKKPNIWYSLNGKIRAVNLPKVTKEKPTPPVKPTAPTKPTYETEKPLKPAPVAPNYEKEPTPPTRTPDQAEPKKPTPPTYETEKPLEPAPVEPSYEAEPTPPTRTPDQAEPNKPTPPTYETEKPLEPAPVEPSYEAEPTPPTPTPDQPEPNKPVEPTYEVIPTPPTDPVYQDLPTPPSIPTVHFHYFKLAVQPQVNKEIRNNNDVNIDRTLVAKQSVVKFQLKTADLPAGRDETTSFVLVDPLPSGYQFNPEATKAASPGFDVAYDNATNTVTFKATAATLATFNADLTKSVATIYPTVVGQVLNDGATYKNNFSLTVNDAYGIKSNVVRVTTPGKPNDPDNPNNNYIKPTKVNKNENGVVIDGKTVLAGSTNYYELTWDLDQYKNDRSSADTIQQGFYYVDDYPEEALELRQDLVKITDANGNEVTGVSVDNYTSLEAAPQEIRDVLSKAGIRPKGAFQIFRADNPREFYDTYVKTGIDLKIVSPMVVKKQMGQTGGSYEDQAYQIDFGNGYASNIVINNVPKINPKKDVTLTLDPADTNNVDGQTIPLNTVFNYRLIGGIIPANHSEELFEYNFYDDYDQTGDHYTGQYKVFAKVDITLKNGVIIKSGTELTQYTTAEVDTTKGAITIKFKEAFLRSVSIDSAFQAESYIQMKRIAVGTFENTYINTVNGVTYSSNTVKTTTPEDPADPTDPQDPSSPRTSTVIIYKPQSTAYQPSSVQKTLPNTGVTNNAYMPLLGIIGLVTSFSLLGLKAKKD

SEQ ID NO: 141 - DNA, 23 bp, Artificial Sequence
  Description of Artificial Sequence: Primer
ggtcagttacgtgcagctgaagg

SEQ ID NO: 142 - DNA, 18 bp, Artificial Sequence
  Description of Artificial Sequence: Primer
gctgaggctgccggatcg

SEQ ID NO: 143 - DNA, 27 bp, Artificial Sequence
  Description of Artificial Sequence: Primer
cgcgcctcgagccacatactggtctgc

SEQ ID NO: 144 - DNA, 23 bp, Artificial Sequence
  Description of Artificial Sequence: Primer
gcttagctgaggctgccggatcg

SEQ ID NO: 145 - DNA, 24 bp, Artificial Sequence
  Description of Artificial Sequence: Primer
gagctctcgactcctgacaatcac

SEQ ID NO: 146 - DNA, 47 bp, Artificial Sequence
  Description of Artificial Sequence: Primer
gagctcggttcctccggtaccgcctctcctgcgcaacaatcttaacg

SEQ ID NO: 147 - DNA, 948 bp, H.sapiens
atgagaggatcgcatcaccatcaccatcacggatccgcatgcgagctcgagccacatactggtctgctcttgctttcagtacagaagagaagcatgtccttccaaggaatcagacaacctgtgaccgtcactgagctagtagattctggtatattgagaccgtccactgtcaatgaactggaatctggtcagatttcttatgacgaggttggtgagagaattaaggacttcctccagggttcaagctgcatagcaggcatatacaatgagaccacaaaacagaagcttggcatttatgaggccatgaaaattggcttagtccgacctggtactgctctggagttgctggaagcccaagcagctactggctttatagtggatcctgttagcaacttgaggttaccagtggaggaagcctacaagagaggtctggtgggcattgagttcaaagagaagctcctgtctgcagaacgagctgtcactgggtataatgatcctgaaacaggaaacatcatctctttgttccaagccatgaataaggaactcatcgaaaagggccacggtattcgcttattagaagcacagatcgcaaccggggggatcattgacccaaaggagagccatcgtttaccagttgacatagcatataagaggggctatttcaatgaggaactcagtgagattctctcagatccaagtgatgataccaaaggattttttgaccccaacactgaagaaaatcttacctatctgcaactaaaagaaagatgcattaaggatgaggaaacagggctctgtcttctgcctctgaaagaaaagaagaaacaggtgcaaacatcacaaaagaataccctcaggaagcgtagagtggtcatagttgacccagaaaccaataaagaaatgtctgttcaggagggggtcgacctgcagccaagcttaattagctga

SEQ ID NO: 148 - DNA, 67 bp, Artificial Sequence
  Description of Artificial Sequence: Primer
cgtactgcatgcggcggtaccggaggaactgcacaagagctcgagccacatactggtctgctcttgc

SEQ ID NO: 149 - DNA, 32 bp, Artificial Sequence
  Description of Artificial Sequence: Primer
ctgcaggtcgaccccctcctgaacagacattt

SEQ ID NO: 150 - DNA, 1680 bp, Araneus didematus
  CDS (2)..(1678)
ttctagcgcggctgcagccgcggcagctgcgtccggcccgggtggctacggtccggaaaaccagggtccatctggcccgggtggctacggtcctggcggtccgggttctagcgcggctgcagccgcggcagctgcgtccggcccgggtggctacggtccggaaaaccagggtccatctggcccgggtggctacggtcctggcggtccgggttctagcgcggctgcagccgcggcagctgcgtccggcccgggtggctacggtccggaaaaccagggtccatctggcccgggtggctacggtcctggcggtccgggttctagcgcggctgcagccgcggcagctgcgtccggcccgggtggctacggtccggaaaaccagggtccatctggcccgggtggctacggtcctggcggtccgggttctagcgcggctgcagccgcggcagctgcgtccggcccgggtggctacggtccggaaaaccagggtccatctggcccgggtggctacggtcctggcggtccgggttctagcgcggctgcagccgcggcagctgcgtccggcccgggtggctacggtccggaaaaccagggtccatctggcccgggtggctacggtcctggcggtccgggttctagcgcggctgcagccgcggcagctgcgtccggcccgggtggctacggtccggaaaaccagggtccatctggcccgggtggctacggtcctggcggtccgggttctagcgcggctgcagccgcggcagctgcgtccggcccgggtggctacggtccggaaaaccagggtccatctggcccgggtggctacggtcctggcggtccgggttctagcgcggctgcagccgcggcagctgcgtccggcccgggtggctacggtccggaaaaccagggtccatctggcccgggtggctacggtcctggcggtccgggttctagcgcggctgcagccgcggcagctgcgtccggcccgggtggctacggtccggaaaaccagggtccatctggcccgggtggctacggtcctggcggtccgggttctagcgcggctgcagccgcggcagctgcgtccggcccgggtggctacggtccggaaaaccagggtccatctggcccgggtggctacggtcctggcggtccgggttctagcgcggctgcagccgcggcagctgcgtccggcccgggtggctacggtccggaaaaccagggtccatctggcccgggtggctacggtcctggcggtccgggttctagcgcggctgcagccgcggcagctgcgtccggcccgggtggctacggtccggaaaaccagggtccatctggcccgggtggctacggtcctggcggtccgggttctagcgcggctgcagccgcggcagctgcgtccggcccgggtggctacggtccggaaaaccagggtccatctggcccgggtggctacggtcctggcggtccgggttctagcgcggctgcagccgcggcagctgcgtccggcccgggtggctacggtccggaaaaccagggtccatctggcccgggtggctacggtcctggcggtccgggttctagcgcggctgcagccgcggcagctgcgtccggcccgggtggctacggtccggaaaaccagggtccatctggcccgggtggctacggtcctggcggtccggg

SEQ ID NO: 151 - protein, 559 aa, Araneus didematus
SSAAAAAAAASGPGGYGPENQGPSGPGGYGPGGPGSSAAAAAAAASGPGGYGPENQGPSGPGGYGPGGPGSSAAAAAAAASGPGGYGPENQGPSGPGGYGPGGPGSSAAAAAAAASGPGGYGPENQGPSGPGGYGPGGPGSSAAAAAAAASGPGGYGPENQGPSGPGGYGPGGPGSSAAAAAAAASGPGGYGPENQGPSGPGGYGPGGPGSSAAAAAAAASGPGGYGPENQGPSGPGGYGPGGPGSSAAAAAAAASGPGGYGPENQGPSGPGGYGPGGPGSSAAAAAAAASGPGGYGPENQGPSGPGGYGPGGPGSSAAAAAAAASGPGGYGPENQGPSGPGGYGPGGPGSSAAAAAAAASGPGGYGPENQGPSGPGGYGPGGPGSSAAAAAAAASGPGGYGPENQGPSGPGGYGPGGPGSSAAAAAAAASGPGGYGPENQGPSGPGGYGPGGPGSSAAAAAAAASGPGGYGPENQGPSGPGGYGPGGPGSSAAAAAAAASGPGGYGPENQGPSGPGGYGPGGPGSSAAAAAAAASGPGGYGPENQGPSGPGGYGPGGP

SEQ ID NO: 152 - DNA, 922 bp, Homo sapiens
  CDS (5)..(922)
caccatgcatcaccatcaccatcacgagccacatactggtctgctcttgctttcagtacagaagagaagcatgtccttccaaggaatcagacaacctgtgaccgtcactgagctagtagattctggtatattgagaccgtccactgtcaatgaactggaatctggtcagatttcttatgacgaggttggtgagagaattaaggacttcctccagggttcaagctgcatagcaggcatatacaatgagaccacaaaacagaagcttggcatttatgaggccatgaaaattggcttagtccgacctggtactgctctggagttgctggaagcccaagcagctactggctttatagtggatcctgttagcaacttgaggttaccagtggaggaagcctacaagagaggtctggtgggcattgagttcaaagagaagctcctgtctgcagaacgagctgtcactgggtataatgatcctgaaacaggaaacatcatctctttgttccaagccatgaataaggaactcatcgaaaagggccacggtattcgcttattagaagcacagatcgcaaccggggggatcattgacccaaaggagagccatcgtttaccagttgacatagcatataagaggggctatttcaatgaggaactcagtgagattctctcagatccaagtgatgataccaaaggattttttgaccccaacactgaagaaaatcttacctatctgcaactaaaagaaagatgcattaaggatgaggaaacagggctctgtcttctgcctctgaaagaaaagaagaaacaggtgcagacatcacaaaagaataccctcaggaagcgtagagtggtcatagttgacccagaaaccaataaagaaatgtctgttcaggagggggtcgacctgcagccaagcttaattagc

SEQ ID NO: 153 - protein, 306 aa, Homo sapiens
MHHHHHHEPHTGLLLLSVQKRSMSFQGIRQPVTVTELVDSGILRPSTVNELESGQISYDEVGERIKDFLQGSSCIAGIYNETTKQKLGIYEAMKIGLVRPGTALELLEAQAATGFIVDPVSNLRLPVEEAYKRGLVGIEFKEKLLSAERAVTGYNDPETGNIISLFQAMNKELIEKGHGIRLLEAQIATGGIIDPKESHRLPVDIAYKRGYFNEELSEILSDPSDDTKGFFDPNTEENLTYLQLKERCIKDEETGLCLLPLKEKKKQVQTSQKNTLRKRRVVIVDPETNKEMSVQEGVDLQPSLIS

SEQ ID NO: 154 - DNA, 45 bp, Artificial Sequence
  Description of Artificial Sequence: Primer
caccatgcatcaccatcaccatcacgagccacatactggtctgct

SEQ ID NO: 155 - DNA, 20 bp, Artificial Sequence
  Description of Artificial Sequence: Primer
gctaattaagcttggctgca

SEQ ID NO: 156 - protein, 283 aa, Homo sapiens
  PEPTIDE (1)..(283)
MRGSHHHHHHGSACELEPHTGLLLLSVQKRSMSFQGIRQPVTVTELVDSGILRPSTVNELESGQISYDEVGERIKDFLQGSSCIAGIYNETTKQKLGIYEAMKIGLVRPGTALELLEAQAATGFIVDPVSNLRLPVEEAYKRGLVGIEFKEKLLSAERAVTGYNDPETGNIISLFQAMNKELIEKGHGIRLLEAQIATGGIIDPKESHRLPVDIAYKRGYFNEELSEILSDPSDDTKGFFDPNTEENLTYLQLKERCIKDEETGLCLLPLKEKKKQVQTSQKN

SEQ ID NO: 157 - protein, 274 aa, Homo sapiens
  PEPTIDE (1)..(274)
MRGSHHHHHHGSACELEPHTGLLLLSVQKRSMSFQGIRQPVTVTELVDSGILRPSTVNELESGQISYDEVGERIKDFLQGSSCIAGIYNETTKQKLGIYEAMKIGLVRPGTALELLEAQAATGFIVDPVSNLRLPVEEAYKRGLVGIEFKEKLLSAERAVTGYNDPETGNIISLFQAMNKELIEKGHGIRLLEAQIATGGIIDPKESHRLPVDIAYKRGYFNEELSEILSDPSDDTKGFFDPNTEENLTYLQLKERCIKDEETGLCLLPLKEKK

SEQ ID NO: 158 - protein, 272 aa, Homo sapiens
  PEPTIDE (1)..(272)
MRGSHHHHHHGSACELEPHTGLLLLSVQKRSMSFQGIRQPVTVTELVDSGILRPSTVNELESGQISYDEVGERIKDFLQGSSCIAGIYNETTKQKLGIYEAMKIGLVRPGTALELLEAQAATGFIVDPVSNLRLPVEEAYKRGLVGIEFKEKLLSAERAVTGYNDPETGNIISLFQAMNKELIEKGHGIRLLEAQIATGGIIDPKESHRLPVDIAYKRGYFNEELSEILSDPSDDTKGFFDPNTEENLTYLQLKERCIKDEETGLCLLPLKE

SEQ ID NO: 159 - DNA, 948 bp, Homo sapiens
  CDS (1)..(945)
atgagaggatcgcatcaccatcaccatcacggatccgcatgcgagctcgagccacatactggtctgctcttgctttcagtacagaagagaagcatgtccttccaaggaatcagacaacctgtgaccgtcactgagctagtagattctggtatattgagaccgtccactgtcaatgaactggaatctggtcagatttcttatgacgaggttggtgagagaattaaggacttcctccagggttcaagctgcatagcaggcatatacaatgagaccacaaaacagaagcttggcatttatgaggccatgaaaattggcttagtccgacctggtactgctctggagttgctggaagcccaagcagctactggctttatagtggatcctgttagcaacttgaggttaccagtggaggaagcctacaagagaggtctggtgggcattgagttcaaagagaagctcctgtctgcagaacgagctgtcactgggtataatgatcctgaaacaggaaacatcatctctttgttccaagccatgaataaggaactcatcgaaaagggccacggtattcgcttattagaagcacagatcgcaaccggggggatcattgacccaaaggagagccatcgtttaccagttgacatagcatataagaggggctatttcaatgaggaactcagtgagattctctcagatccaagtgatgataccaaaggattttttgaccccaacactgaagaaaatcttacctatctgcaactaaaagaaagatgcattaaggatgaggaaacagggctctgtcttctgcctctgaaagaaaagaagaaacaggtgcagacatcacaaaagaataccctcaggaagcgtagagtggtcatagttgacccagaaaccaataaagaaatgtctgttcaggagggggtcgacctgcagccaagcttaattagctga

SEQ ID NO: 160 - protein, 315 aa, Homo sapiens
MRGSHHHHHHGSACELEPHTGLLLLSVQKRSMSFQGIRQPVTVTELVDSGILRPSTVNELESGQISYDEVGERIKDFLQGSSCIAGIYNETTKQKLGIYEAMKIGLVRPGTALELLEAQAATGFIVDPVSNLRLPVEEAYKRGLVGIEFKEKLLSAERAVTGYNDPETGNIISLFQAMNKELIEKGHGIRLLEAQIATGGIIDPKESHRLPVDIAYKRGYFNEELSEILSDPSDDTKGFFDPNTEENLTYLQLKERCIKDEETGLCLLPLKEKKKQVQTSQKNTLRKRRVVIVDPETNKEMSVQEGVDLQPSLIS

SEQ ID NO: 161 - DNA, 2099 bp, Homo sapiens
  CDS (135)..(1628)
gtgcaaacagggaggaaacagccggcgttgctgtagcgcgtctgggaattacaccgggggactggccggcccgcttcgtgcctgcgggaagtcgggccgggggactcttcggaaactccgagcctcagagaaatatggcgctcccgacgctgccgtcctactggtgcagccagcagcgcctgaatcagcagctagcacgacagcgagagcaggaggcccggcttcggcagcagtgggagcagaacagccgttacttcaggatgtctgacatctgcagctccaaacaggcagaatggagctctaaaacctcctaccagcggagcatgcatgcctatcagcgggagaagatgaaggaggagaagaggaggagtctggaggcccgacgggaaaagctcaggcagctcatgcaggaggagcaggacctgctggccagagaactggaggagctgaggctgagcatgaacttgcaggaaagaagaatccgggagcagcacgggaagctgaaatcagccaaagaagagcagaggaaactgattgctgaacaacttttgtacgaacactggaaaaagaacaacccgaaacttcgagagatggagctggaccttcaccagaagcatgtcgtaaactcttgggaaatgcagaaagaagaaaaaaaacagcaagaagccaccgcagagcaagagaacaaacggtatgaaaatgaatatgaaagggcccgaagggaggcgctagaaaggatgaaagctgaagaggagaggaggcagctggaggacaagctccaggccgaggcactgctgcaacagatggaggagctgaagctgaaggaggtggaggcgaccaaactaaagaaggagcaggagaatctgttgaagcagcggtgggagctagagaggctggaggaagagcgaaagcagatggaagccttccggcagaaggcagagctggggcgtttcttgagacatcagtataacgctcaactcagcagacgcacacagcagatccaagaggagctggaggcagacaggcggatcctgcaggccctcctcgagaaggaggacgagagccagcgcctccacctggccaggcgggagcaggtcatggccgatgtggcctggatgaagcaggccattgaggagcagctgcagctggagcgggcgcgggaggcagagctgcagatgctgctgagggaggaggccaaggagatgtgggaaaagagagaggcagagtgggcccgagagcgcagcgcacgggacagactgatgagcgaggttctgacagggagacaacagcaaatacaagagaagattgagcagaaccgacgggcacaagaggaatccctgaaacacagggagcaacttattcgaaatcttgaggaggtgagagagttggctcgtcgcgagaaagaggagagtgaaaagctgaaatcggccaggaagcaggagctggaagcccaggttgcagagcgccggctgcaggcatgggaagcagaccagcaggaggaggaggaagaggaggaggcccggcgggtcgagcagctctcagatgccctgctgcagcaggaggcggagactatggctgagcagggctaccggcctaagccttacggacatccaaaaattgcttggaactgacttcatgggtaccataagtacagagaacaagggatgctgaggcttctgatcccagccgccaggcagttttacagggctctgttaacagtaagtgcccggggcactgtcagatggctcagcagtgcctgctcaggttcatcattgaaacatcccagtgtttggccagacattaaggtgtcgtgagagtccctttcatgcctttcttacccaagcaagggtctttgatgggcacgtgtttacagcgctgctgcatagtcttgtaatatattaacagtcacatcaactgaaggtcaatactaagagccacaggttgtacctgtgatggggcgtgtggtttcctgttgtctcacctttaattgtcaacctccagtgttgactctagaaatatgaggaaagcttttcagtttttaaaattgccatttaaatttagtctattaaaaacaaacctagaaaaaaaaaaaaaaaaaa

SEQ ID NO: 162 - protein, 498 aa, Homo sapiens
MALPTLPSYWCSQQRLNQQLARQREQEARLRQQWEQNSRYFRMSDICSSKQAEWSSKTSYQRSMHAYQREKMKEEKRRSLEARREKLRQLMQEEQDLLARELEELRLSMNLQERRIREQHGKLKSAKEEQRKLIAEQLLYEHWKKNNPKLREMELDLHQKHVVNSWEMQKEEKKQQEATAEQENKRYENEYERARREALERMKAEEERRQLEDKLQAEALLQQMEELKLKEVEATKLKKEQENLLKQRWELERLEEERKQMEAFRQKAELGRFLRHQYNAQLSRRTQQIQEELEADRRILQALLEKEDESQRLHLARREQVMADVAWMKQAIEEQLQLERAREAELQMLLREEAKEMWEKREAEWARERSARDRLMSEVLTGRQQQIQEKIEQNRRAQEESLKHREQLIRNLEEVRELARREKEESEKLKSARKQELEAQVAERRLQAWEADQQEEEEEEEARRVEQLSDALLQQEAETMAEQGYRPKPYGHPKIAWN

SEQ ID NO: 163 - DNA, 8616 bp, Homo sapiens
  CDS (1)..(8613)
atgagctgcaacggaggctcccacccgcggatcaacactctgggccgcatgatccgcgccgagtctggcccggacctgcgctacgaggtgaccagcggcggcgggggcaccagcaggatgtactattctcggcgcggcgtgatcaccgaccagaactcggacggctactgtcaaaccggcacgatgtccaggcaccagaaccagaacaccatccaggagctgctgcagaactgctccgactgcttgatgcgagcagagctcatcgtgcagcctgaattgaagtatggagatggaatacaactgactcggagtcgagaattggatgagtgttttgcccaggccaatgaccaaatggaaatcctcgacagcttgatcagagagatgcggcagatgggccagccctgtgatgcttaccagaaaaggcttcttcagctccaagagcaaatgcgagccctttataaagccatcagtgtccctcgagtccgcagggccagctccaagggtggtggaggctacacttgtcagagtggctctggctgggatgagttcaccaaacatgtcaccagtgaatgtttggggtggatgaggcagcaaagggcggagatggacatggtggcctggggtgtggacctggcctcagtggagcagcacattaacagccaccggggcatccacaactccatcggcgactatcgctggcagctggacaaaatcaaagccgacctgcgcgagaaatctgcgatctaccagttggaggaggagtatgaaaacctgctgaaagcgtcctttgagaggatggatcacctgcgacagctgcagaacatcattcaggccacgtccagggagatcatgtggatcaatgactgcgaggaggaggagctgctgtacgactggagcgacaagaacaccaacatcgctcagaaacaggaggccttctccatacgcatgagtcaactggaagttaaagaaaaagagctcaataagctgaaacaagaaagtgaccaacttgtcctcaatcagcatccagcttcagacaaaattgaggcctatatggacactctgcagacgcagtggagttggattcttcagatcaccaagtgcattgatgttcatctgaaagaaaatgctgcctactttcagttttttgaagaggcgcagtctactgaagcatacctgaaggggctccaggactccatcaggaagaagtacccctgcgacaagaacatgcccctgcagcacctgctggaacagatcaaggagctggagaaagaacgagagaaaatccttgaatacaagcgtcaggtgcagaacttggtaaacaagtctaagaagattgtacagctgaagcctcgtaacccagactacagaagcaataaacccattattctcagagctctctgtgactacaaacaagatcagaaaatcgtgcataagggggatgagtgtatcctgaaggacaacaacgagcgcagcaagtggtacgtgacgggcccgggaggcgttgacatgcttgttccctctgtggggctgatcatccctcctccgaacccactggccgtggacctctcttgcaagattgagcagtactacgaagccatcttggctctgtggaaccagctctacatcaacatgaagagcctggtgtcctggcactactgcatgattgacatagagaagatcagggccatgacaatcgccaagctgaaaacaatgcggcaggaagattacatgaagacgatagccgaccttgagttacattaccaagagttcatcagaaatagccaaggctcagagatgtttggagatgatgacaagcggaaaatacagtctcagttcaccgatgcccagaagcattaccagaccctggtcattcagctccctggctatccccagcaccagacagtgaccacaactgaaatcactcatcatggaacctgccaagatgtcaaccataataaagtaattgaaaccaacagagaaaatgacaagcaagaaacatggatgctgatggagctgcagaagattcgcaggcagatagagcactgcgagggcaggatgactctcaaaaacctccctctagcagaccaggggtcttctcaccacatcacagtgaaaattaacgagcttaagagtgtgcagaatgattcacaagcaattgctgaggttctcaaccagcttaaagatatgcttgccaacttcagaggttctgaaaagtactgctatttacagaatgaagtatttggactatttcagaaactggaaaatatcaatggtgttacagatggctacttaaatagcttatgcacagtaagggcactgctccaggctattctccaaacagaagacatgttaaaggtttatgaagccaggctcactgaggaggaaactgtctgcctggacctggataaagtggaagcttaccgctgtggactgaagaaaataaaaaatgacttgaacttgaagaagtcgttgttggccactatgaagacagaactacagaaagcccagcagatccactctcagacttcacagcagtatccactttatgatctggacttgggcaagttcggtgaaaaagtcacacagctgacagaccgctggcaaaggatagataaacagatcgactttagattatgggacctggagaaacaaatcaagcaattgaggaattatcgtgataactatcaggctttctgcaagtggctctatgatcgtaaacgccgccaggattccttagaatccatgaaatttggagattccaacacagtcatgcggtttttgaatgagcagaagaacttgcacagtgaaatatctggcaaacgagacaaatcagaggaagtacaaaaaattgctgaactttgcgccaattcaattaaggattatgagctccagctggcctcatacacctcaggactggaaactctgctgaacatacctatcaagaggaccatgattcagtccccttctggggtgattctgcaagaggctgcagatgttcatgctcggtacattgaactacttacaagatctggagactattacaggttcttaagtgagatgctgaagagtttggaagatctgaagctgaaaaataccaagatcgaagttttggaagaggagctcagactggcccgagatgccaactcggaaaactgtaataagaacaaattcctggatcagaacctgcagaaataccaggcagagtgttcccagttcaaagcgaagcttgcgagcctggaggagctgaagagacaggctgagctggatgggaagtcggctaagcaaaatctagacaagtgctacggccaaataaaagaactcaatgagaagatcacccgactgacttatgagattgaagatgaaaagagaagaagaaaatctgtggaagacagatttgaccaacagaagaatgactatgaccaactgcagaaagcaaggcaatgtgaaaaggagaaccttggttggcagaaattagagtctgagaaagccatcaaggagaaggagtacgagattgaaaggttgagggttctactgcaggaagaaggcacccggaagagagaatatgaaaatgagctggcaaaggtaagaaaccactataatgaggagatgagtaatttaaggaacaagtatgaaacagagattaacattacgaagaccaccatcaaggagatatccatgcaaaaagaggatgattccaaaaatcttagaaaccagcttgatagactttcaagggaaaatcgagatctgaaggatgaaattgtcaggctcaatgacagcatcttgcaggccactgagcagcgaaggcgagctgaagaaaacgcccttcagcaaaaggcctgtggctctgagataatgcagaagaagcagcatctggagatagaactgaagcaggtcatgcagcagcgctctgaggacaatgcccggcacaagcagtccctggaggaggctgccaagaccattcaggacaaaaataaggagatcgagagactcaaagctgagtttcaggaggaggccaagcgccgctgggaatatgaaaatgaactgagtaaggtaagaaacaattatgatgaggagatcattagcttaaaaaatcagtttgagaccgagatcaacatcaccaagaccaccatccaccagctcaccatgcagaaggaagaggataccagtggctaccgggctcagatagacaatctcacccgagaaaacaggagcttatctgaagaaataaagaggctgaagaacactctaacccagaccacagagaatctcaggagggtggaagaagacatccaacagcaaaaggccactggctctgaggtgtctcagaggaaacagcagctggaggttgagctgagacaagtcactcagatgcgaacagaggagagcgtaagatataagcaatctcttgatgatgctgccaaaaccatccaggataaaaacaaggagatagaaaggttaaaacaactgatcgacaaagaaacaaatgaccggaaatgcctggaagatgaaaacgcgagattacaaagggtccagtatgacctgcagaaagcaaacagtagtgcgacggagacaataaacaaactgaaggttcaggagcaagaactgacacgcctgaggatcgactatgaaagggtttcccaggagaggactgtgaaggaccaggatatcacgcggttccagaactctctgaaagagctgcagctgcagaagcagaaggtggaagaggagctgaatcggctgaagaggaccgcgtcagaagactcctgcaagaggaagaagctggaggaagagctggaaggcatgaggaggtcgctgaaggagcaagccatcaaaatcaccaacctgacccagcagctggagcaggcatccattgttaagaagaggagtgaggatgacctccggcagcagagggacgtgctggatggccacctgagggaaaagcagaggacccaggaagagctgaggaggctctcttctgaggtcgaggccctgaggcggcagttactccaggaacaggaaagtgtcaaacaagctcacttgaggaatgagcatttccagaaggcgatagaagataaaagcagaagcttaaatgaaagcaaaatagaaattgagaggctgcagtctctcacagagaacctgaccaaggagcacttgatgttagaagaagaactgcggaacctgaggctggagtacgatgacctgaggagaggacgaagcgaagcggacagtgataaaaatgcaaccatcttggaactaaggagccagctgcagatcagcaacaaccggaccctggaactgcaggggctgattaatgatttacagagagagagggaaaatttgagacaggaaattgagaaattccaaaagcaggctttagaggcatctaataggattcaggaatcaaagaatcagtgtactcaggtggtacaggaaagagagagccttctggtgaaaatcaaagtcctggagcaagacaaggcaaggctgcagaggctggaggatgagctgaatcgtgcaaaatcaactctagaggcagaaaccagggtgaaacagcgcctggagtgtgagaaacagcaaattcagaatgacctgaatcagtggaagactcaatattcccgcaaggaggaggctattaggaagatagaatcggaaagagaaaagagtgagagagagaagaacagtcttaggagtgagatcgaaagactccaagcagagatcaagagaattgaagagaggtgcaggcgtaagctggaggattctaccagggagacacagtcacagttagaaacagaacgctcccgatatcagagggagattgataaactcagacagcgcccatatgggtcccatcgagagacccagactgagtgtgagtggaccgttgacacctccaagctggtgtttgatgggctgaggaagaaggtgacagcaatgcagctctatgagtgtcagctgatcgacaaaacaaccttggacaaactattgaaggggaagaagtcagtggaagaagttgcttctgaaatccagccattccttcggggtgcaggatctatcgctggagcatctgcttctcctaaggaaaaatactctttggtagaggccaagagaaagaaattaatcagcccagaatccacagtcatgcttctggaggcccaggcagctacaggtggtataattgatccccatcggaatgagaagctgactgtcgacagtgccatagctcgggacctcattgacttcgatgaccgtcagcagatatatgcagcagaaaaagctatcactggttttgatgatccattttcaggcaagacagtatctgtttcagaagccatcaagaaaaatttgattgatagagaaaccggaatgcgcctgctggaagcccagattgcttcagggggtgtagtagaccctgtgaacagtgtctttttgccaaaagatgtcgccttggcccgggggctgattgatagagatttgtatcgatccctgaatgatccccgagatagtcagaaaaactttgtggatccagtcaccaaaaagaaggtcagttacgtgcagctgaaggaacggtgcagaatcgaaccacatactggtctgctcttgctttcagtacagaagagaagcatgtccttccaaggaatcagacaacctgtgaccgtcactgagctagtagattctggtatattgagaccgtccactgtcaatgaactggaatctggtcagatttcttatgacgaggttggtgagagaattaaggacttcctccagggttcaagctgcatagcaggcatatacaatgagaccacaaaacagaagcttggcatttatgaggccatgaaaattggcttagtccgacctggtactgctctggagttgctggaagcccaagcagctactggctttatagtggatcctgttagcaacttgaggttaccagtggaggaagcctacaagagaggtctggtgggcattgagttcaaagagaagctcctgtctgcagaacgagctgtcactgggtataatgatcctgaaacaggaaacatcatctctttgttccaagccatgaataaggaactcatcgaaaagggccacggtattcgcttattagaagcacagatcgcaaccggggggatcattgacccaaaggagagccatcgtttaccagttgacatagcatataagaggggctatttcaatgaggaactcagtgagattctctcagatccaagtgatgataccaaaggattttttgaccccaacactgaagaaaatcttacctatctgcaactaaaagaaagatgcattaaggatgaggaaacagggctctgtcttctgcctctgaaagaaaagaagaaacaggtgcagacatcacaaaagaataccctcaggaagcgtagagtggtcatagttgacccagaaaccaataaagaaatgtctgttcaggaggcctacaagaagggcctaattgattatgaaaccttcaaagaactgtgtgagcaggaatgtgaatgggaagaaataaccatcacgggatcagatggctccaccagggtggtcctggtagatagaaagacaggcagtcagtatgatattcaagatgctattgacaagggccttgttgacaggaagttctttgatcagtaccgatccggcagcctcagcctcactcaatttgctgacatgatctccttgaaaaatggtgtcggcaccagcagcagcatgggcagtggtgtcagcgatgatgtttttagcagctcccgacatgaatcagtaagtaagatttccaccatatccagcgtcaggaatttaaccataaggagcagctctttttcagacaccctggaagaatcgagccccattgcagccatctttgacacagaaaacctggagaaaatctccattacagaaggtatagagcggggcatcgttgacagcatcacgggtcagaggcttctggaggctcaggcctgcacaggtggcatcatccacccaaccacgggccagaagctgtcacttcaggacgcagtctcccagggtgtgattgaccaagacatggccaccagcgtgaagcctgctcagaaagccttcataggcttcgagggtgtgaagggaaagaagaagatgtcagcagcagaggcagtgaaagaaaaatggctcccgtatgaggctggccagcgcttcctggagttccagtacctcacgggaggtcttgttgacccggaagtgcatgggaggataagcaccgaagaagccatccggaaggggttcatagatggccgcgccgcacagaggctgcaagacaccagcagctatgccaaaatcctgacctgccccaaaaccaaattaaaaatatcctataaggatgccataaatcgctccatggtagaagatatcactgggctgcgccttctggaagccgcctccgtgtcgtccaagggcttacccagcccttacaacatgtcttcggctccggggtcccgctccggctcccgctcgggatctcgctccggatctcgctccgggtcccgcagtgggtcccggagaggaagctttgacgccacagggaattcttcctactcttattcctactcatttagcagtagttctattgggcactag

SEQ ID NO: 164 - protein, 2871 aa, Homo sapiens
MSCNGGSHPRINTLGRMIRAESGPDLRYEVTSGGGGTSRMYYSRRGVITDQNSDGYCQTGTMSRHQNQNTIQELLQNCSDCLMRAELIVQPELKYGDGIQLTRSRELDECFAQANDQMEILDSLIREMRQMGQPCDAYQKRLLQLQEQMRALYKAISVPRVRRASSKGGGGYTCQSGSGWDEFTKHVTSECLGWMRQQRAEMDMVAWGVDLASVEQHINSHRGIHNSIGDYRWQLDKIKADLREKSAIYQLEEEYENLLKASFERMDHLRQLQNIIQATSREIMWINDCEEEELLYDWSDKNTNIAQKQEAFSIRMSQLEVKEKELNKLKQESDQLVLNQHPASDKIEAYMDTLQTQWSWILQITKCIDVHLKENAAYFQFFEEAQSTEAYLKGLQDSIRKKYPCDKNMPLQHLLEQIKELEKEREKILEYKRQVQNLVNKSKKIVQLKPRNPDYRSNKPIILRALCDYKQDQKIVHKGDECILKDNNERSKWYVTGPGGVDMLVPSVGLIIPPPNPLAVDLSCKIEQYYEAILALWNQLYINMKSLVSWHYCMIDIEKIRAMTIAKLKTMRQEDYMKTIADLELHYQEFIRNSQGSEMFGDDDKRKIQSQFTDAQKHYQTLVIQLPGYPQHQTVTTTEITHHGTCQDVNHNKVIETNRENDKQETWMLMELQKIRRQIEHCEGRMTLKNLPLADQGSSHHITVKINELKSVQNDSQAIAEVLNQLKDMLANFRGSEKYCYLQNEVFGLFQKLENINGVTDGYLNSLCTVRALLQAILQTEDMLKVYEARLTEEETVCLDLDKVEAYRCGLKKIKNDLNLKKSLLATMKTELQKAQQIHSQTSQQYPLYDLDLGKFGEKVTQLTDRWQRIDKQIDFRLWDLEKQIKQLRNYRDNYQAFCKWLYDRKRRQDSLESMKFGDSNTVMRFLNEQKNLHSEISGKRDKSEEVQKIAELCANSIKDYELQLASYTSGLETLLNIPIKRTMIQSPSGVILQEAADVHARYIELLTRSGDYYRFLSEMLKSLEDLKLKNTKIEVLEEELRLARDANSENCNKNKFLDQNLQKYQAECSQFKAKLASLEELKRQAELDGKSAKQNLDKCYGQIKELNEKITRLTYEIEDEKRRRKSVEDRFDQQKNDYDQLQKARQCEKENLGWQKLESEKAIKEKEYEIERLRVLLQEEGTRKREYENELAKVRNHYNEEMSNLRNKYETEINITKTTIKEISMQKEDDSKNLRNQLDRLSRENRDLKDEIVRLNDSILQATEQRRRAEENALQQKACGSEIMQKKQHLEIELKQVMQQRSEDNARHKQSLEEAAKTIQDKNKEIERLKAEFQEEAKRRWEYENELSKVRNNYDEEIISLKNQFETEINITKTTIHQLTMQKEEDTSGYRAQIDNLTRENRSLSEEIKRLKNTLTQTTENLRRVEEDIQQQKATGSEVSQRKQQLEVELRQVTQMRTEESVRYKQSLDDAAKTIQDKNKEIERLKQLIDKETNDRKCLEDENARLQRVQYDLQKANSSATETINKLKVQEQELTRLRIDYERVSQERTVKDQDITRFQNSLKELQLQKQKVEEELNRLKRTASEDSCKRKKLEEELEGMRRSLKEQAIKITNLTQQLEQASIVKKRSEDDLRQQRDVLDGHLREKQRTQEELRRLSSEVEALRRQLLQEQESVKQAHLRNEHFQKAIEDKSRSLNESKIEIERLQSLTENLTKEHLMLEEELRNLRLEYDDLRRGRSEADSDKNATILELRSQLQISNNRTLELQGLINDLQRERENLRQEIEKFQKQALEASNRIQESKNQCTQVVQERESLLVKIKVLEQDKARLQRLEDELNRAKSTLEAETRVKQRLECEKQQIQNDLNQWKTQYSRKEEAIRKIESEREKSEREKNSLRSEIERLQAEIKRIEERCRRKLEDSTRETQSQLETERSRYQREIDKLRQRPYGSHRETQTECEWTVDTSKLVFDGLRKKVTAMQLYECQLIDKTTLDKLLKGKKSVEEVASEIQPFLRGAGSIAGASASPKEKYSLVEAKRKKLISPESTVMLLEAQAATGGIIDPHRNEKLTVDSAIARDLIDFDDRQQIYAAEKAITGFDDPFSGKTVSVSEAIKKNLIDRETGMRLLEAQIASGGVVDPVNSVFLPKDVALARGLIDRDLYRSLNDPRDSQKNFVDPVTKKKVSYVQLKERCRIEPHTGLLLLSVQKRSMSFQGIRQPVTVTELVDSGILRPSTVNELESGQISYDEVGERIKDFLQGSSCIAGIYNETTKQKLGIYEAMKIGLVRPGTALELLEAQAATGFIVDPVSNLRLPVEEAYKRGLVGIEFKEKLLSAERAVTGYNDPETGNIISLFQAMNKELIEKGHGIRLLEAQIATGGIIDPKESHRLPVDIAYKRGYFNEELSEILSDPSDDTKGFFDPNTEENLTYLQLKERCIKDEETGLCLLPLKEKKKQVQTSQKNTLRKRRVVIVDPETNKEMSVQEAYKKGLIDYETFKELCEQECEWEEITITGSDGSTRVVLVDRKTGSQYDIQDAIDKGLVDRKFFDQYRSGSLSLTQFADMISLKNGVGTSSSMGSGVSDDVFSSSRHESVSKISTISSVRNLTIRSSSFSDTLEESSPIAAIFDTENLEKISITEGIERGIVDSITGQRLLEAQACTGGIIHPTTGQKLSLQDAVSQGVIDQDMATSVKPAQKAFIGFEGVKGKKKMSAAEAVKEKWLPYEAGQRFLEFQYLTGGLVDPEVHGRISTEEAIRKGFIDGRAAQRLQDTSSYAKILTCPKTKLKISYKDAINRSMVEDITGLRLLEAASVSSKGLPSPYNMSSAPGSRSGSRSGSRSGSRSGSRSGSRRGSFDATGNSSYSYSYSFSSSSIGH

SEQ ID NO: 165 - DNA, 948 bp, Homo sapiens; identical to SEQ ID NO: 159
  CDS (1)..(945)

SEQ ID NO: 166 - protein, 315 aa, Homo sapiens; identical to SEQ ID NO: 160

SEQ ID NO: 167 - DNA, 2652 bp, Artificial Sequence
  Description of Artificial Sequence: Chimeric Molecule
  CDS (1)..(2649)
atgagaggatcgcatcaccatcaccatcacggatccgcatgcggttctagcgcggctgcagccgcggcagctgcgtccggcccgggtggctacggtccggaaaaccagggtccatctggcccgggtggctacggtcctggcggtccgggttctagcgcggctgcagccgcggcagctgcgtccggcccgggtggctacggtccggaaaaccagggtccatctggcccgggtggctacggtcctggcggtccgggttctagcgcggctgcagccgcggcagctgcgtccggcccgggtggctacggtccggaaaaccagggtccatctggcccgggtggctacggtcctggcggtccgggttctagcgcggctgcagccgcggcagctgcgtccggcccgggtggctacggtccggaaaaccagggtccatctggcccgggtggctacggtcctggcggtccgggttctagcgcggctgcagccgcggcagctgcgtccggcccgggtggctacggtccggaaaaccagggtccatctggcccgggtggctacggtcctggcggtccgggttctagcgcggctgcagccgcggcagctgcgtccggcccgggtggctacggtccggaaaaccagggtccatctggcccgggtggctacggtcctggcggtccgggttctagcgcggctgcagccgcggcagctgcgtccggcccgggtggctacggtccggaaaaccagggtccatctggcccgggtggctacggtcctggcggtccgggttctagcgcggctgcagccgcggcagctgcgtccggcccgggtggctacggtccggaaaaccagggtccatctggcccgggtggctacggtcctggcggtccgggttctagcgcggctgcagccgcggcagctgcgtccggcccgggtggctacggtccggaaaaccagggtccatctggcccgggtggctacggtcctggcggtccgggttctagcgcggctgcagccgcggcagctgcgtccggcccgggtggctacggtccggaaaaccagggtccatctggcccgggtggctacggtcctggcggtccgggttctagcgcggctgcagccgcggcagctgcgtccggcccgggtggctacggtccggaaaaccagggtccatctggcccgggtggctacggtcctggcggtccgggttctagcgcggctgcagccgcggcagctgcgtccggcccgggtggctacggtccggaaaaccagggtccatctggcccgggtggctacggtcctggcggtccgggttctagcgcggctgcagccgcggcagctgcgtccggcccgggtggctacggtccggaaaaccagggtccatctggcccgggtggctacggtcctggcggtccgggttctagcgcggctgcagccgcggcagctgcgtccggcccgggtggctacggtccggaaaaccagggtccatctggcccgggtggctacggtcctggcggtccgggttctagcgcggctgcagccgcggcagctgcgtccggcccgggtggctacggtccggaaaaccagggtccatctggcccgggtggctacggtcctggcggtccgggttctagcgcggctgcagccgcggcagctgcgtccggcccgggtggctacggtccggaaaaccagggtccatctggcccgggtggctacggtcctggcggtccgggcggtaccggaggaactgcacaagagctcgagccacatactggtctgctcttgctttcagtacagaagagaagcatgtccttccaaggaatcagacaacctgtgaccgtcactgagctagtagattctggtatattgagaccgtccactgtcaatgaactggaatctggtcagatttcttatgacgaggttggtgagagaattaaggacttcctccagggttcaagctgcatagcaggcatatacaatgagaccacaaaacagaagcttggcatttatgaggccatgaaaattggcttagtccgacctggtactgctctggagttgctggaagcccaagcagctactggctttatagtggatcctgttagcaacttgaggttaccagtggaggaagcctacaagagaggtctggtgggcattgagttcaaagagaagctcctgtctgcagaacgagctgtcactgggtataatgatcctgaaacaggaaacatcatctctttgttccaagccatgaataaggaactcatcgaaaagggccacggtattcgcttattagaagcacagatcgcaaccggggggatcattgacccaaaggagagccatcgtttaccagttgacatagcatataagaggggctatttcaatgaggaactcagtgagattctctcagatccaagtgatgataccaaaggattttttgaccccaacactgaagaaaatcttacctatctgcaactaaaagaaagatgcattaaggatgaggaaacagggctctgtcttctgcctctgaaagaaaagaagaaacaggtgcaaacatcacaaaagaataccctcaggaagcgtagagtggtcatagttgacccagaaaccaataaagaaatgtctgttcaggagggggtcgacctgcagccaagcttaattagctga

SEQ ID NO: 168 - protein, 883 aa, Artificial Sequence
  Description of Artificial Sequence: Synthetic Construct
MRGSHHHHHHGSACGSSAAAAAAAASGPGGYGPENQGPSGPGGYGPGGPGSSAAAAAAAASGPGGYGPENQGPSGPGGYGPGGPGSSAAAAAAAASGPGGYGPENQGPSGPGGYGPGGPGSSAAAAAAAASGPGGYGPENQGPSGPGGYGPGGPGSSAAAAAAAASGPGGYGPENQGPSGPGGYGPGGPGSSAAAAAAAASGPGGYGPENQGPSGPGGYGPGGPGSSAAAAAAAASGPGGYGPENQGPSGPGGYGPGGPGSSAAAAAAAASGPGGYGPENQGPSGPGGYGPGGPGSSAAAAAAAASGPGGYGPENQGPSGPGGYGPGGPGSSAAAAAAAASGPGGYGPENQGPSGPGGYGPGGPGSSAAAAAAAASGPGGYGPENQGPSGPGGYGPGGPGSSAAAAAAAASGPGGYGPENQGPSGPGGYGPGGPGSSAAAAAAAASGPGGYGPENQGPSGPGGYGPGGPGSSAAAAAAAASGPGGYGPENQGPSGPGGYGPGGPGSSAAAAAAAASGPGGYGPENQGPSGPGGYGPGGPGSSAAAAAAAASGPGGYGPENQGPSGPGGYGPGGPGGTGGTAQELEPHTGLLLLSVQKRSMSFQGIRQPVTVTELVDSGILRPSTVNELESGQISYDEVGERIKDFLQGSSCIAGIYNETTKQKLGIYEAMKIGLVRPGTALELLEAQAATGFIVDPVSNLRLPVEEAYKRGLVGIEFKEKLLSAERAVTGYNDPETGNIISLFQAMNKELIEKGHGIRLLEAQIATGGIIDPKESHRLPVDIAYKRGYFNEELSEILSDPSDDTKGFFDPNTEENLTYLQLKERCIKDEETGLCLLPLKEKKKQVQTSQKNTLRKRRVVIVDPETNKEMSVQEGVDLQPSLIS

SEQ ID NO: 169 - DNA, 27 bp, Artificial Sequence
  Description of Artificial Sequence: Primer
gagctcgccgactctacgtcgaaaagc

SEQ ID NO: 170 - DNA, 54 bp, Artificial Sequence
  Description of Artificial Sequence: Primer
gagctcagaacctccggtaccaccgatttcggctctggccttcgcttcggccac

SEQ ID NO: 171 - DNA, 925 bp, Bombyx mori
  CDS (1)..(924)
aaagcatgcgccgactctacgtcgaaaagcgcgccaaaaatcaacgaggaaaccgccgaaagacaattaaacgaattgataaacgtggacagtcacgatgagtacgagaataggctgagcaggatcagtagcgccctagcgaactggatgaaatcagttttcaatatggacaccacgaccaaggaggagttcgatcctgtttggctatcgatcgatgagtacaagagtcaggctaacgagagcatggcgaacgcttggcgcatcatcacgctgccgaactggacggtggagaagcgagggaccgtcaggggagacgtcgtggagtcaaggaaagttgaaggcttcggcaaggtttatagatttacgggcgtcgtcaactgtcccgccaggtttctatacgaggagttcaagaacaacctgacgaagttgcccgaatggaatccgacgatattgaaatgcgaaataattaaggaaatcggcgatggcgtggacctatcgtaccaggtgacggctggcgggggacgaggcataataacccctcgtgacttcgtgatcctgcgccggaccgcgctactctcccgggagggacgcgtcgtcgacgacaatccccacggatacatcagtagcggagtcagcgttcaagttccggggtatccgcccctcaaggagatggttaggggacacaataaagtcggttgctggtacctccagcctcggaccgtgcagactcctggaggaaaaatcgaggaccaggccctgttccaatggttgatgtgttgtgatctcaaaggtaaaatacctcaattcgtgttggacgtcgctttcgccactgtgatgctggactacatcgtgcacgtcaggaagttcgtggccgaagcgaaggccagagccgaaatcggtggtaccggaggttctgagctcaagg

SEQ ID NO: 172 - protein, 308 aa, Bombyx mori
KACADSTSKSAPKINEETAERQLNELINVDSHDEYENRLSRISSALANWMKSVFNMDTTTKEEFDPVWLSIDEYKSQANESMANAWRIITLPNWTVEKRGTVRGDVVESRKVEGFGKVYRFTGVVNCPARFLYEEFKNNLTKLPEWNPTILKCEIIKEIGDGVDLSYQVTAGGGRGIITPRDFVILRRTALLSREGRVVDDNPHGYISSGVSVQVPGYPPLKEMVRGHNKVGCWYLQPRTVQTPGGKIEDQALFQWLMCCDLKGKIPQFVLDVAFATVMLDYIVHVRKFVAEAKARAEIGGTGGSELK

SEQ ID NO: 173 - DNA, 33 bp, Artificial Sequence
  Description of Artificial Sequence: Primer
aaagcatgcgccgactctacgtcgaaaagcgcg

SEQ ID NO: 174 - DNA, 32 bp, Artificial Sequence
  Description of Artificial Sequence: Primer
ccttgagctcagaacctccggtaccaccgatt

SEQ ID NO: 175 - DNA, 1851 bp, Artificial Sequence
  Description of Artificial Sequence: Chimeric Molecule
  CDS (1)..(1848)
atgagaggatcgcatcaccatcaccatcacggatccgcatgcgccgactctacgtcgaaaagcgcgccaaaaatcaacgaggaaaccgccgaaagacaattaaacgaattgataaacgtggacagtcacgatgagtacgagaataggctgagcaggatcagtagcgccctagcgaactggatgaaatcagttttcaatatggacaccacgaccaaggaggagttcgatcctgtttggctatcgatcgatgagtacaagagtcaggctaacgagagcatggcgaacgcttggcgcatcatcacgctgccgaactggacggtggagaagcgagggaccgtcaggggagacgtcgtggagtcaaggaaagttgaaggcttcggcaaggtttatagatttacgggcgtcgtcaactgtcccgccaggtttctatacgaggagttcaagaacaacctgacgaagttgcccgaatggaatccgacgatattgaaatgcgaaataattaaggaaatcggcgatggcgtggacctatcgtaccaggtgacggctggcgggggacgaggcataataacccctcgtgacttcgtgatcctgcgccggaccgcgctactctcccgggagggacgcgtcgtcgacgacaatccccacggatacatcagtagcggagtcagcgttcaagttccggggtatccgcccctcaaggagatggttaggggacacaataaagtcggttgctggtacctccagcctcggaccgtgcagactcctggaggaaaaatcgaggaccaggccctgttccaatggttgatgtgttgtgatctcaaaggtaaaatacctcaattcgtgttggacgtcgctttcgccactgtgatgctggactacatcgtgcacgtcaggaagttcgtggccgaagcgaaggccagagccgaaatcggtggtaccggaggttctgagctcgagccacatactggtctgctcttgctttcagtacagaagagaagcatgtccttccaaggaatcagacaacctgtgaccgtcactgagctagtagattctggtatattgagaccgtccactgtcaatgaactggaatctggtcagatttcttatgacgaggttggtgagagaattaaggacttcctccagggttcaagctgcatagcaggcatatacaatgagaccacaaaacagaagcttggcatttatgaggccatgaaaattggcttagtccgacctggtactgctctggagttgctggaagcccaagcagctactggctttatagtggatcctgttagcaacttgaggttaccagtggaggaagcctacaagagaggtctggtgggcattgagttcaaagagaagctcctgtctgcagaacgagctgtcactgggtataatgatcctgaaacaggaaacatcatctctttgttccaagccatgaataaggaactcatcgaaaagggccacggtattcgcttattagaagcacagatcgcaaccggggggatcattgacccaaaggagagccatcgtttaccagttgacatagcatataagaggggctatttcaatgaggaactcagtgagattctctcagatccaagtgatgataccaaaggattttttgaccccaacactgaagaaaatcttacctatctgcaactaaaagaaagatgcattaaggatgaggaaacagggctctgtcttctgcctctgaaagaaaagaagaaacaggtgcagacatcacaaaagaataccctcaggaagcgtagagtggtcatagttgacccagaaaccaataaagaaatgtctgttcaggagggggtcgacctgcagccaagcttaattagc

SEQ ID NO: 176 - protein, 616 aa, Artificial Sequence
  Description of Artificial Sequence: Synthetic Construct
MRGSHHHHHHGSACADSTSKSAPKINEETAERQLNELINVDSHDEYENRLSRISSALANWMKSVFNMDTTTKEEFDPVWLSIDEYKSQANESMANAWRIITLPNWTVEKRGTVRGDVVESRKVEGFGKVYRFTGVVNCPARFLYEEFKNNLTKLPEWNPTILKCEIIKEIGDGVDLSYQVTAGGGRGIITPRDFVILRRTALLSREGRVVDDNPHGYISSGVSVQVPGYPPLKEMVRGHNKVGCWYLQPRTVQTPGGKIEDQALFQWLMCCDLKGKIPQFVLDVAFATVMLDYIVHVRKFVAEAKARAEIGGTGGSELEPHTGLLLLSVQKRSMSFQGIRQPVTVTELVDSGILRPSTVNELESGQISYDEVGERIKDFLQGSSCIAGIYNETTKQKLGIYEAMKIGLVRPGTALELLEAQAATGFIVDPVSNLRLPVEEAYKRGLVGIEFKEKLLSAERAVTGYNDPETGNIISLFQAMNKELIEKGHGIRLLEAQIATGGIIDPKESHRLPVDIAYKRGYFNEELSEILSDPSDDTKGFFDPNTEENLTYLQLKERCIKDEETGLCLLPLKEKKKQVQTSQKNTLRKRRVVIVDPETNKEMSVQEGVDLQPSLI

SEQ ID NO: 177 - DNA, 24 bp, Artificial Sequence
  Description of Artificial Sequence: Primer
gagctctcgactcctgacaatcac

SEQ ID NO: 178 - DNA, 47 bp, Artificial Sequence; identical to SEQ ID NO: 146
  Description of Artificial Sequence: Primer

SEQ ID NO: 179 - DNA, 2223 bp, E.coli
  CDS (1)..(2223)
gagctctcgactcctgacaatcacggcaagaaagcccctcaatttgctgcgttcaaaccgctaaccacggtacagaacgccaacgactgttgctgcgacggcgcatgttccagcacgccaactctctctgaaaacgtctccggcacccgctatagctggaaagtcagcggcatggactgcgccgcctgtgcgcgcaaggtagaaaatgccgtgcgccagcttgcaggcgtgaatcaggtgcaggtgttgttcgccaccgaaaaactggtggtcgatgccgacaatgacattcgtgcacaagttgaatctgcgctgcaaaaagcaggctattccctgcgcgatgaacaggccgccgaagaaccgcaagcatcacgcctgaaagagaatctgccgctgattacgctaatcgtgatgatggcaatcagctggggtctggagcagttcaatcatccgttcgggcaactggcgtttatcgcgaccacgctggttgggctgtacccgattgctcgtcaggcattacggttgatcaaatccggcagctacttcgccattgaaaccttaatgagcgtagccgctattggtgcactgtttattggcgcaacggctgaagctgcgatggtgttgctgctgtttttgattggtgaacgactggaaggctgggccgccagccgcgcgcgtcagggcgttagcgcgttaatggcgctgaaaccagaaaccgccacgcgcctgcgtaagggtgagcgggaagaggtggcgattaacagcctgcgccctggcgatgtgattgaagtcgccgcaggtgggcgtttgcctgccgacggtaaactgctctcaccgtttgccagttttgatgaaagcgccctgaccggcgaatccattccggtggagcgcgcaacgggcgataaagtccctgctggtgccaccagcgtagaccgtctggtgacgttggaagtgctgtcagaaccgggagccagcgccattgaccggattctgaaactgatcgaagaagccgaagagcgtcgcgctcccattgagcggtttatcgaccgtttcagccgtatctatacgcccgcgattatggccgtcgctctgctggtgacgctggtgccaccgctgctgtttgccgccagctggcaggagtggatttataaagggctgacgctgctgctgattggctgcccgtgtgcgttagttatctcaacgcctgcggcgattacctccgggctggcggcggcagcgcgtcgtggggcgttgattaaaggcggagcggcgctggaacagctgggtcgtgttactcaggtggcgtttgataaaaccggtacgctgaccgtcggtaaaccgcgcgttaccgcgattcatccggcaacgggtattagtgaatctgaactgctgacactggcggcggcggtcgagcaaggcgcgacgcatccactggcgcaagccatcgtacgcgaagcacaggttgctgaactcgccattcccaccgccgaatcacagcgggcgctggtcgggtctggcattgaagcgcaggttaacggtgagcgcgtattgatttgcgctgccgggaaacatcccgctgatgcatttactggtttaattaacgaactggaaagcgccgggcaaacggtagtgctggtagtacgtaacgatgacgtgcttggtgtcattgcgttacaggataccctgcgcgccgatgctgcaactgccatcagtgaactgaacgcgctgggcgtcaaaggggtgatcctcaccggcgataatccacgcgcagcggcggcaattgccggggagctggggctggagtttaaagcgggcctgttgccggaagataaagtcaaagcggtgaccgagctgaatcaacatgcgccgctggcgatggtcggtgacggtattaacgacgcgccagcgatgaaagctgccgccatcgggattgcaatgggtagcggcacagacgtggcgctggaaaccgccgacgcagcattaacccataaccacctgcgcggcctggtgcaaatgattgaactggcacgcgccactcacgccaatatccgccagaacatcactattgcgctggggctgaaagggatcttcctcgtcaccacgctgttagggatgaccgggttgtggctggcagtgctggcagatacgggggcgacggtgctggtgacagcgaatgcgttaagattgttgcgcaggagaggcggtaccggaggaaccgagctc

SEQ ID NO: 180 - protein, 741 aa, E.coli
ELSTPDNHGKKAPQFAAFKPLTTVQNANDCCCDGACSSTPTLSENVSGTRYSWKVSGMDCAACARKVENAVRQLAGVNQVQVLFATEKLVVDADNDIRAQVESALQKAGYSLRDEQAAEEPQASRLKENLPLITLIVMMAISWGLEQFNHPFGQLAFIATTLVGLYPIARQALRLIKSGSYFAIETLMSVAAIGALFIGATAEAAMVLLLFLIGERLEGWAASRARQGVSALMALKPETATRLRKGEREEVAINSLRPGDVIEVAAGGRLPADGKLLSPFASFDESALTGESIPVERATGDKVPAGATSVDRLVTLEVLSEPGASAIDRILKLIEEAEERRAPIERFIDRFSRIYTPAIMAVALLVTLVPPLLFAASWQEWIYKGLTLLLIGCPCALVISTPAAITSGLAAAARRGALIKGGAALEQLGRVTQVAFDKTGTLTVGKPRVTAIHPATGISESELLTLAAAVEQGATHPLAQAIVREAQVAELAIPTAESQRALVGSGIEAQVNGERVLICAAGKHPADAFTGLINELESAGQTVVLVVRNDDVLGVIALQDTLRADAATAISELNALGVKGVILTGDNPRAAAAIAGELGLEFKAGLLPEDKVKAVTELNQHAPLAMVGDGINDAPAMKAAAIGIAMGSGTDVALETADAALTHNHLRGLVQMIELARATHANIRQNITIALGLKGIFLVTTLLGMTGLWLAVLADTGATVLVTANALRLLRRRGGTGGTEL

SEQ ID NO: 181 - DNA, 3165 bp, Artificial Sequence
  Description of Artificial Sequence: Chimeric Molecule
  CDS (1)..(3162)
atgagaggatcgcatcaccatcaccatcacggatccgcatgcgagctctcgactcctgacaatcacggcaagaaagcccctcaatttgctgcgttcaaaccgctaaccacggtacagaacgccaacgactgttgctgcgacggcgcatgttccagcacgccaactctctctgaaaacgtctccggcacccgctatagctggaaagtcagcggcatggactgcgccgcctgtgcgcgcaaggtagaaaatgccgtgcgccagcttgcaggcgtgaatcaggtgcaggtgttgttcgccaccgaaaaactggtggtcgatgccgacaatgacattcgtgcacaagttgaatctgcgctgcaaaaagcaggctattccctgcgcgatgaacaggccgccgaagaaccgcaagcatcacgcctgaaagagaatctgccgctgattacgctaatcgtgatgatggcaatcagctggggtctggagcagttcaatcatccgttcgggcaactggcgtttatcgcgaccacgctggttgggctgtacccgattgctcgtcaggcattacggttgatcaaatccggcagctacttcgccattgaaaccttaatgagcgtagccgctattggtgcactgtttattggcgcaacggctgaagctgcgatggtgttgctgctgtttttgattggtgaacgactggaaggctgggccgccagccgcgcgcgtcagggcgttagcgcgttaatggcgctgaaaccagaaaccgccacgcgcctgcgtaagggtgagcgggaagaggtggcgattaacagcctgcgccctggcgatgtgattgaagtcgccgcaggtgggcgtttgcctgccgacggtaaactgctctcaccgtttgccagttttgatgaaagcgccctgaccggcgaatccattccggtggagcgcgcaacgggcgataaagtccctgctggtgccaccagcgtagaccgtctggtgacgttggaagtgctgtcagaaccgggagccagcgccattgaccggattctgaaactgatcgaagaagccgaagagcgtcgcgctcccattgagcggtttatcgaccgtttcagccgtatctatacgcccgcgattatggccgtcgctctgctggtgacgctggtgccaccgctgctgtttgccgccagctggcaggagtggatttataaagggctgacgctgctgctgattggctgcccgtgtgcgttagttatctcaacgcctgcggcgattacctccgggctggcggcggcagcgcgtcgtggggcgttgattaaaggcggagcggcgctggaacagctgggtcgtgttactcaggtggcgtttgataaaaccggtacgctgaccgtcggtaaaccgcgcgttaccgcgattcatccggcaacgggtattagtgaatctgaactgctgacactggcggcggcggtcgagcaaggcgcgacgcatccactggcgcaagccatcgtacgcgaagcacaggttgctgaactcgccattcccaccgccgaatcacagcgggcgctggtcgggtctggcattgaagcgcaggttaacggtgagcgcgtattgatttgcgctgccgggaaacatcccgctgatgcatttactggtttaattaacgaactggaaagcgccgggcaaacggtagtgctggtagtacgtaacgatgacgtgcttggtgtcattgcgttacaggataccctgcgcgccgatgctgcaactgccatcagtgaactgaacgcgctgggcgtcaaaggggtgatcctcaccggcgataatccacgcgcagcggcggcaattgccggggagctggggctggagtttaaagcgggcctgttgccggaagataaagtcaaagcggtgaccgagctgaatcaacatgcgccgctggcgatggtcggtgacggtattaacgacgcgccagcgatgaaagctgccgccatcgggattgcaatgggtagcggcacagacgtggcgctggaaaccgccgacgcagcattaacccataaccacctgcgcggcctggtgcaaatgattgaactggcacgcgccactcacgccaatatccgccagaacatcactattgcgctggggctgaaagggatcttcctcgtcaccacgctgttagggatgaccgggttgtggctggcagtgctggcagatacgggggcgacggtgctggtgacagcgaatgcgttaagattgttgcgcaggagaggcggtaccggaggaaccgagctcgagccacatactggtctgctcttgctttcagtacagaagagaagcatgtccttccaaggaatcagacaacctgtgaccgtcactgagctagtagattctggtatattgagaccgtccactgtcaatgaactggaatctggtcagatttcttatgacgaggttggtgagagaattaaggacttcctccagggttcaagctgcatagcaggcatatacaatgagaccacaaaacagaagcttggcatttatgaggccatgaaaattggcttagtccgacctggtactgctctggagttgctggaagcccaagcagctactggctttatagtggatcctgttagcaacttgaggttaccagtggaggaagcctacaagagaggtctggtgggcattgagttcaaagagaagctcctgtctgcagaacgagctgtcactgggtataatgatcctgaaacaggaaacatcatctctttgttccaagccatgaataaggaactcatcgaaaagggccacggtattcgcttattagaagcacagatcgcaaccggggggatcattgacccaaaggagagccatcgtttaccagttgacatagcatataagaggggctatttcaatgaggaactcagtgagattctctcagatccaagtgatgataccaaaggattttttgaccccaacactgaagaaaatcttacctatctgcaactaaaagaaagatgcattaaggatgaggaaacagggctctgtcttctgcctctgaaagaaaagaagaaacaggtgcagacatcacaaaagaataccctcaggaagcgtagagtggtcatagttgacccagaaaccaataaagaaatgtctgttcaggagggggtcgacctgcagccaagcttaattagctga

SEQ ID NO: 182 - protein, 1054 aa, Artificial Sequence
  Description of Artificial Sequence: Synthetic Construct
MRGSHHHHHHGSACELSTPDNHGKKAPQFAAFKPLTTVQNANDCCCDGACSSTPTLSENVSGTRYSWKVSGMDCAACARKVENAVRQLAGVNQVQVLFATEKLVVDADNDIRAQVESALQKAGYSLRDEQAAEEPQASRLKENLPLITLIVMMAISWGLEQFNHPFGQLAFIATTLVGLYPIARQALRLIKSGSYFAIETLMSVAAIGALFIGATAEAAMVLLLFLIGERLEGWAASRARQGVSALMALKPETATRLRKGEREEVAINSLRPGDVIEVAAGGRLPADGKLLSPFASFDESALTGESIPVERATGDKVPAGATSVDRLVTLEVLSEPGASAIDRILKLIEEAEERRAPIERFIDRFSRIYTPAIMAVALLVTLVPPLLFAASWQEWIYKGLTLLLIGCPCALVISTPAAITSGLAAAARRGALIKGGAALEQLGRVTQVAFDKTGTLTVGKPRVTAIHPATGISESELLTLAAAVEQGATHPLAQAIVREAQVAELAIPTAESQRALVGSGIEAQVNGERVLICAAGKHPADAFTGLINELESAGQTVVLVVRNDDVLGVIALQDTLRADAATAISELNALGVKGVILTGDNPRAAAAIAGELGLEFKAGLLPEDKVKAVTELNQHAPLAMVGDGINDAPAMKAAAIGIAMGSGTDVALETADAALTHNHLRGLVQMIELARATHANIRQNITIALGLKGIFLVTTLLGMTGLWLAVLADTGATVLVTANALRLLRRRGGTGGTELEPHTGLLLLSVQKRSMSFQGIRQPVTVTELVDSGILRPSTVNELESGQISYDEVGERIKDFLQGSSCIAGIYNETTKQKLGIYEAMKIGLVRPGTALELLEAQAATGFIVDPVSNLRLPVEEAYKRGLVGIEFKEKLLSAERAVTGYNDPETGNIISLFQAMNKELIEKGHGIRLLEAQIATGGIIDPKESHRLPVDIAYKRGYFNEELSEILSDPSDDTKGFFDPNTEENLTYLQLKERCIKDEETGLCLLPLKEKKKQVQTSQKNTLRKRRVVIVDPETNKEMSVQEGVDLQPSLIS

SEQ ID NO: 183 - DNA, 41 bp, Artificial Sequence
  Description of Artificial Sequence: Primer
gtaagaatgcggccgcctcctgaacagacatttctttattg

SEQ ID NO: 184 - DNA, 41 bp, Artificial Sequence
  Description of Artificial Sequence: Primer
gcagatctagaggatcgcatcaccatcaccatcacggatcc

SEQ ID NO: 185 - DNA, 435 bp, E.coli
  CDS (1)..(432)
atgctttacgaaagcgtatccggtgaaataaagtcaacctttagttggttaatgttacaccaacaacgaaaccaacacgccaggcttattcctgtggagttatatatgagcgataaaattattcacctgactgacgacagttttgacacggatgtactcaaagcggacggggcgatcctcgtcgatttctgggcagagtggtgcggtccgtgcaaaatgatcgccccgattctggatgaaatcgctgacgaatatcagggcaaactgaccgttgcaaaactgaacatcgatcaaaaccctggcactgcgccgaaatatggcatccgtggtatcccgactctgctgctgttcaaaaacggtgaagtggcggcaaccaaagtgggcgcactgtctaaaggtcagttgaaagagttcctcgacgctaacctggcgtaa

SEQ ID NO: 186 - protein, 144 aa, E.coli
MLYESVSGEIKSTFSWLMLHQQRNQHARLIPVELYMSDKIIHLTDDSFDTDVLKADGAILVDFWAEWCGPCKMIAPILDEIADEYQGKLTVAKLNIDQNPGTAPKYGIRGIPTLLLFKNGEVAATKVGALSKGQLKEFLDANLA

SEQ ID NO: 187 - DNA, 1314 bp, Artificial Sequence
  Description of Artificial Sequence: Chimeric Molecule
  CDS (1)..(1311)
atgtctgataaaattattcatctgactgatgattcttttgatactgatgtacttaaggcagatggtgcaatcctggttgatttctgggcacactggtgcggtccgtgcaaaatgatcgctccgattctggatgaaatcgctgacgaatatcagggcaaactgaccgttgcaaaactgaacatcgatcacaacccgggcactgcgccgaaatatggcatccgtggtatcccgactctgctgctgttcaaaaacggtgaagtggcggcaaccaaagtgggtgcactgtctaaaggtcagttgaaagagttcctcgacgctaacctggccggctctggatccggtgatgacgatgacaaggtacctggcatgctgagctcgagatctagaggatcgcatcaccatcaccatcacggatccgcatgcgagctcgagccacatactggtctgctcttgctttcagtacagaagagaagcatgtccttccaaggaatcagacaacctgtgaccgtcactgagctagtagattctggtatattgagaccgtccactgtcaatgaactggaatctggtcagatttcttatgacgaggttggtgagagaattaaggacttcctccagggttcaagctgcatagcaggcatatacaatgagaccacaaaacagaagcttggcatttatgaggccatgaaaattggcttagtccgacctggtactgctctggagttgctggaagcccaagcagctactggctttatagtggatcctgttagcaacttgaggttaccagtggaggaagcctacaagagaggtctggtgggcattgagttcaaagagaagctcctgtctgcagaacgagctgtcactgggtataatgatcctgaaacaggaaacatcatctctttgttccaagccatgaataaggaactcatcgaaaagggccacggtattcgcttattagaagcacagatcgcaaccggggggatcattgacccaaaggagagccatcgtttaccagttgacatagcatataagaggggctatttcaatgaggaactcagtgagattctctcagatccaagtgatgataccaaaggattttttgaccccaacactgaagaaaatcttacctatctgcaactaaaagaaagatgcattaaggatgaggaaacagggctctgtcttctgcctctgaaagaaaagaagaaacaggtgcagacatcacaaaagaataccctcaggaagcgtagagtggtcatagttgacccagaaaccaataaagaaatgtctgttcaggaggcggccgcaggcctctag

SEQ ID NO: 188 - protein, 437 aa, Artificial Sequence
  Description of Artificial Sequence: Synthetic Construct
MSDKIIHLTDDSFDTDVLKADGAILVDFWAHWCGPCKMIAPILDEIADEYQGKLTVAKLNIDHNPGTAPKYGIRGIPTLLLFKNGEVAATKVGALSKGQLKEFLDANLAGSGSGDDDDKVPGMLSSRSRGSHHHHHHGSACELEPHTGLLLLSVQKRSMSFQGIRQPVTVTELVDSGILRPSTVNELESGQISYDEVGERIKDFLQGSSCIAGIYNETTKQKLGIYEAMKIGLVRPGTALELLEAQAATGFIVDPVSNLRLPVEEAYKRGLVGIEFKEKLLSAERAVTGYNDPETGNIISLFQAMNKELIEKGHGIRLLEAQIATGGIIDPKESHRLPVDIAYKRGYFNEELSEILSDPSDDTKGFFDPNTEENLTYLQLKERCIKDEETGLCLLPLKEKKKQVQTSQKNTLRKRRVVIVDPETNKEMSVQEAAAGL

SEQ ID NO: 189 - DNA, 27 bp, Artificial Sequence
  Description of Artificial Sequence: Primer
gcgagctcgtgagcaagggcgaggagc

SEQ ID NO: 190 - DNA, 27 bp, Artificial Sequence
  Description of Artificial Sequence: Primer
gcgagctccttgtacagctcgtccatg

SEQ ID NO: 191 - DNA, 768 bp, Artificial Sequence
  Description of Artificial Sequence: Chimeric Molecule
  CDS (1)..(768)
atgagaggatcgcatcaccatcaccatcacggatccgcatgcgagctcgtgagcaagggcgaggagctgttcaccggggtggtgcccatcctggtcgagctggacggcgacgtaaacggccacaagttcagcgtgtccggcgagggcgagggcgatgccacctacggcaagctgaccctgaagttcatctgcaccaccggcaagctgcccgtgccctggcccaccctcgtgaccaccctgacctacggcgtgcagtgcttcagccgctaccccgaccacatgaagcagcacgacttcttcaagtccgccatgcccgaaggctacgtccaggagcgcaccatcttcttcaaggacgacggcaactacaagacccgcgccgaggtgaagttcgagggcgacaccctggtgaaccgcatcgagctgaagggcatcgacttcaaggaggacggcaacatcctggggcacaagctggagtacaactacaacagccacaacgtctatatcatggccgacaagcagaagaacggcatcaaggtgaacttcaagatccgccacaacatcgaggacggcagcgtgcagctcgccgaccactaccagcagaacacccccatcggcgacggccccgtgctgctgcccgacaaccactacctgagcacccagtccgccctgagcaaagaccccaacgagaagcgcgatcacatggtcctgctggagttcgtgaccgccgccgggatcactctcggcatggacgagctgtacaaggagctc

SEQ ID NO: 192 - protein, 256 aa, Artificial Sequence
  Description of Artificial Sequence: Synthetic Construct
MRGSHHHHHHGSACELVSKGEELFTGVVPILVELDGDVNGHKFSVSGEGEGDATYGKLTLKFICTTGKLPVPWPTLVTTLTYGVQCFSRYPDHMKQHDFFKSAMPEGYVQERTIFFKDDGNYKTRAEVKFEGDTLVNRIELKGIDFKEDGNILGHKLEYNYNSHNVYIMADKQKNGIKVNFKIRHNIEDGSVQLADHYQQNTPIGDGPVLLPDNHYLSTQSALSKDPNEKRDHMVLLEFVTAAGITLGMDELYKEL

SEQ ID NO: 193 - DNA, 1668 bp, Artificial Sequence
  Description of Artificial Sequence: Chimeric Molecule
  CDS (1)..(1665)
atgagaggatcgcatcaccatcaccatcacggatccgcatgcgagctcgtgagcaagggcgaggagctgttcaccggggtggtgcccatcctggtcgagctggacggcgacgtaaacggccacaagttcagcgtgtccggcgagggcgagggcgatgccacctacggcaagctgaccctgaagttcatctgcaccaccggcaagctgcccgtgccctggcccaccctcgtgaccaccctgacctacggcgtgcagtgcttcagccgctaccccgaccacatgaagcagcacgacttcttcaagtccgccatgcccgaaggctacgtccaggagcgcaccatcttcttcaaggacgacggcaactacaagacccgcgccgaggtgaagttcgagggcgacaccctggtgaaccgcatcgagctgaagggcatcgacttcaaggaggacggcaacatcctggggcacaagctggagtacaactacaacagccacaacgtctatatcatggccgacaagcagaagaacggcatcaaggtgaacttcaagatccgccacaacatcgaggacggcagcgtgcagctcgccgaccactaccagcagaacacccccatcggcgacggccccgtgctgctgcccgacaaccactacctgagcacccagtccgccctgagcaaagaccccaacgagaagcgcgatcacatggtcctgctggagttcgtgaccgccgccgggatcactctcggcatggacgagctgtacaaggagctcgagccacatactggtctgctcttgctttcagtacagaagagaagcatgtccttccaaggaatcagacaacctgtgaccgtcactgagctagtagattctggtatattgagaccgtccactgtcaatgaactggaatctggtcagatttcttatgacgaggttggtgagagaattaaggacttcctccagggttcaagctgcatagcaggcatatacaatgagaccacaaaacagaagcttggcatttatgaggccatgaaaattggcttagtccgacctggtactgctctggagttgctggaagcccaagcagctactggctttatagtggatcctgttagcaacttgaggttaccagtggaggaagcctacaagagaggtctggtgggcattgagttcaaagagaagctcctgtctgcagaacgagctgtcactgggtataatgatcctgaaacaggaaacatcatctctttgttccaagccatgaataaggaactcatcgaaaagggccacggtattcgcttattagaagcacagatcgcaaccggggggatcattgacccaaaggagagccatcgtttaccagttgacatagcatataagaggggctatttcaatgaggaactcagtgagattctctcagatccaagtgatgataccaaaggattttttgaccccaacactgaagaaaatcttacctatctgcaactaaaagaaagatgcattaaggatgaggaaacagggctctgtcttctgcctctgaaagaaaagaagaaacaggtgcagacatcacaaaagaataccctcaggaagcgtagagtggtcatagttgacccagaaaccaataaagaaatgtctgttcaggagggggtcgacctgcagccaagcttaattagctga

SEQ ID NO: 194 - protein, 555 aa, Artificial Sequence
  Description of Artificial Sequence: Synthetic Construct
MRGSHHHHHHGSACELVSKGEELFTGVVPILVELDGDVNGHKFSVSGEGEGDATYGKLTLKFICTTGKLPVPWPTLVTTLTYGVQCFSRYPDHMKQHDFFKSAMPEGYVQERTIFFKDDGNYKTRAEVKFEGDTLVNRIELKGIDFKEDGNILGHKLEYNYNSHNVYIMADKQKNGIKVNFKIRHNIEDGSVQLADHYQQNTPIGDGPVLLPDNHYLSTQSALSKDPNEKRDHMVLLEFVTAAGITLGMDELYKELEPHTGLLLLSVQKRSMSFQGIRQPVTVTELVDSGILRPSTVNELESGQISYDEVGERIKDFLQGSSCIAGIYNETTKQKLGIYEAMKIGLVRPGTALELLEAQAATGFIVDPVSNLRLPVEEAYKRGLVGIEFKEKLLSAERAVTGYNDPETGNIISLFQAMNKELIEKGHGIRLLEAQIATGGIIDPKESHRLPVDIAYKRGYFNEELSEILSDPSDDTKGFFDPNTEENLTYLQLKERCIKDEETGLCLLPLKEKKKQVQTSQKNTLRKRRVVIVDPETNKEMSVQEGVDLQPSLIS

SEQ ID NO: 195 - DNA, 28 bp, Artificial Sequence
  Description of Artificial Sequence: Primer
gcgagctcgctcaaacaggtactgaacg

SEQ ID NO: 196 - DNA, 29 bp, Artificial Sequence
  Description of Artificial Sequence: Primer
gcgagctcccagccgcgttcttgcatacg

SEQ ID NO: 197 - DNA, 933 bp, Bacillus subtilis
  CDS (1)..(933)
atgagaggatcgcatcaccatcaccatcacggatccgcatgcgagctcgctcaaacaggtactgaacgtgtaaaacgcggaatggcagaaatgcaaaaaggcggcgtcatcatggacgtcatcaatgcggaacaagcgaaaatcgctgaagaagctggagctgtcgctgtaatggcgctagaacgtgtgccagcagatattcgcgcggctggaggagttgcccgtatggctgaccctacaatcgtggaagaagtaatgaatgcagtatctatcccggtaatggcaaaagcgcgtatcggacatattgttgaagcgcgtgtgcttgaagctatgggtgttgactatattgatgaaagtgaagttctgacgccggctgacgaagaatttcatttaaataaaaatgaatacacagttccttttgtctgtggctgccgtgatcttggtgaagcaacacgccgtattgcggaaggtgcttctatgcttcgcacaaaaggtgagcctggaacaggtaatattgttgaggctgttcgccatatgcgtaaagttaacgctcaagtgcgcaaagtagttgcgatgagtgaggatgagctaatgacagaagcgaaaaacctaggtgctccttacgagcttcttcttcaaattaaaaaagacggcaagcttcctgtcgttaactttgccgctggcggcgtagcaactccagctgatgctgctctcatgatgcagcttggtgctgacggagtatttgttggttctggtatttttaaatcagacaaccctgctaaatttgcgaaagcaattgtggaagcaacaactcactttactgattacaaattaatcgctgagttgtcaaaagagcttggtactgcaatgaaagggattgaaatctcaaacttacttccagaacagcgtatgcaagaacgcggctgggagctc

SEQ ID NO: 198 - protein, 311 aa, Bacillus subtilis
MRGSHHHHHHGSACELAQTGTERVKRGMAEMQKGGVIMDVINAEQAKIAEEAGAVAVMALERVPADIRAAGGVARMADPTIVEEVMNAVSIPVMAKARIGHIVEARVLEAMGVDYIDESEVLTPADEEFHLNKNEYTVPFVCGCRDLGEATRRIAEGASMLRTKGEPGTGNIVEAVRHMRKVNAQVRKVVAMSEDELMTEAKNLGAPYELLLQIKKDGKLPVVNFAAGGVATPADAALMMQLGADGVFVGSGIFKSDNPAKFAKAIVEATTHFTDYKLIAELSKELGTAMKGIEISNLLPEQRMQERGWEL

SEQ ID NO: 199 - DNA, 1833 bp, Artificial Sequence
  Description of Artificial Sequence: Chimeric Molecule
  CDS (1)..(1830)
atgagaggatcgcatcaccatcaccatcacggatccgcatgcgagctcgctcaaacaggtactgaacgtgtaaaacgcggaatggcagaaatgcaaaaaggcggcgtcatcatggacgtcatcaatgcggaacaagcgaaaatcgctgaagaagctggagctgtcgctgtaatggcgctagaacgtgtgccagcagatattcgcgcggctggaggagttgcccgtatggctgaccctacaatcgtggaagaagtaatgaatgcagtatctatcccggtaatggcaaaagcgcgtatcggacatattgttgaagcgcgtgtgcttgaagctatgggtgttgactatattgatgaaagtgaagttctgacgccggctgacgaagaatttcatttaaataaaaatgaatacacagttccttttgtctgtggctgccgtgatcttggtgaagcaacacgccgtattgcggaaggtgcttctatgcttcgcacaaaaggtgagcctggaacaggtaatattgttgaggctgttcgccatatgcgtaaagttaacgctcaagtgcgcaaagtagttgcgatgagtgaggatgagctaatgacagaagcgaaaaacctaggtgctccttacgagcttcttcttcaaattaaaaaagacggcaagcttcctgtcgttaactttgccgctggcggcgtagcaactccagctgatgctgctctcatgatgcagcttggtgctgacggagtatttgttggttctggtatttttaaatcagacaaccctgctaaatttgcgaaagcaattgtggaagcaacaactcactttactgattacaaattaatcgctgagttgtcaaaagagcttggtactgcaatgaaagggattgaaatctcaaacttacttccagaacagcgtatgcaagaacgcggctgggagctcgagccacatactggtctgctcttgctttcagtacagaagagaagcatgtccttccaaggaatcagacaacctgtgaccgtcactgagctagtagattctggtatattgagaccgtccactgtcaatgaactggaatctggtcagatttcttatgacgaggttggtgagagaattaaggacttcctccagggttcaagctgcatagcaggcatatacaatgagaccacaaaacagaagcttggcatttatgaggccatgaaaattggcttagtccgacctggtactgctctggagttgctggaagcccaagcagctactggctttatagtggatcctgttagcaacttgaggttaccagtggaggaagcctacaagagaggtctggtgggcattgagttcaaagagaagctcctgtctgcagaacgagctgtcactgggtataatgatcctgaaacaggaaacatcatctctttgttccaagccatgaataaggaactcatcgaaaagggccacggtattcgcttattagaagcacagatcgcaaccggggggatcattgacccaaaggagagccatcgtttaccagttgacatagcatataagaggggctatttcaatgaggaactcagtgagattctctcagatccaagtgatgataccaaaggattttttgaccccaacactgaagaaaatcttacctatctgcaactaaaagaaagatgcattaaggatgaggaaacagggctctgtcttctgcctctgaaagaaaagaagaaacaggtgcagacatcacaaaagaataccctcaggaagcgtagagtggtcatagttgacccagaaaccaataaagaaatgtctgttcaggagggggtcgacctgcagccaagcttaattagctga

SEQ ID NO: 200 - protein, 610 aa, Artificial Sequence
  Description of Artificial Sequence: Synthetic Construct
MRGSHHHHHHGSACELAQTGTERVKRGMAEMQKGGVIMDVINAEQAKIAEEAGAVAVMALERVPADIRAAGGVARMADPTIVEEVMNAVSIPVMAKARIGHIVEARVLEAMGVDYIDESEVLTPADEEFHLNKNEYTVPFVCGCRDLGEATRRIAEGASMLRTKGEPGTGNIVEAVRHMRKVNAQVRKVVAMSEDELMTEAKNLGAPYELLLQIKKDGKLPVVNFAAGGVATPADAALMMQLGADGVFVGSGIFKSDNPAKFAKAIVEATTHFTDYKLIAELSKELGTAMKGIEISNLLPEQRMQERGWELEPHTGLLLLSVQKRSMSFQGIRQPVTVTELVDSGILRPSTVNELESGQISYDEVGERIKDFLQGSSCIAGIYNETTKQKLGIYEAMKIGLVRPGTALELLEAQAATGFIVDPVSNLRLPVEEAYKRGLVGIEFKEKLLSAERAVTGYNDPETGNIISLFQAMNKELIEKGHGIRLLEAQIATGGIIDPKESHRLPVDIAYKRGYFNEELSEILSDPSDDTKGFFDPNTEENLTYLQLKERCIKDEETGLCLLPLKEKKKQVQTSQKNTLRKRRVVIVDPETNKEMSVQEGVDLQPSLIS

SEQ ID NO: 201 - protein, 410 aa, Araneus diadematus
AGSSAAAAAAASGSGGYGPENQGPSGPVAYGPGGPVSSAAAAAAAGSGPGGYGPENQGPSGPGGYGPGGSGSSAAAAAAAASGPGGYGPGSQGPSGPGGSGGYGPGSQGASGPGGPGASAAAAAAAAAASGPGGYGPGSQGPSGPGAYGPGGPGSSAAAAAAAASGPGGYGPGSQGPSGPGVYGPGGPGSSAAAAAAAGSGPGGYGPENQGPSGPGGYGPGGSGSSAAAAAAAASGPGGYGPGSQGPSGPGGSGGYGPGSQGGSGPGASAAAAAAAASGPGGYGPGSQGPSGPGYQGPSGPGAYGPSPSASASVAASVYLRLQPRLEVSSAVSSLVSSGPTNGAAVSGALNSLVSQISASNPGLSGCDALVQALLELVSALVAILSSASIGQVNVSSVSQSTQMISQALS

SEQ ID NO: 202 - protein, 592 aa, Nephila clavipes
ASAASSLAYSIGISAARSLGIADAAGLAGALARAAGALGQGDTAASYGNALSTAAGQFFATAGLLNAGNASALASSFARAFSASAESQSFAQSQAFQQASAFQQAASRSASQSAAEADSTSSSTTTTTSAARSQAASQSASSSYSSAFAQAASSSFAISSALSRAFSSVSSASAASSLAYSIGLSAARSLGIADATGLAGALARAVGALGQGATAASYGNALSTAAAQFFATAGLLNAGNASALASSFARAFSASAESQSFAQSQAFQQASAFQQAASRSASQSAAEAGSTSSSTTTTTSAARSQAASQSASSSYSSAFAQAASSSLATSSALSRAFSSVSSASAASSLAYSIGLSAARSLGIADAAGLAGVLARAAGALGQGATAASYGNALSTAAGQFFAAQGLLNAGNVSSLASALANALSYSAANSAASGNYIGVSQNFGSIAPVAGTAGISVGVPGLLPTSAGTVLAPANAQIIAPGLQTTLAPVFSSSGLSSASANARVSSLAQSFASALSASRGTLSVSTFLTLLSPISSQIRANTSLDGTQATVQVLLEALAALLQVINAAQITEVNVSNVSSANAALVSALAG

SEQ ID NO: 203 - protein, 294 aa, Araneus gemmoides
SASQSQAAASAFRQAASQSASQSASRAGSQSSSKTTSTSTSGSQADSRSASSSASQASASAIAQQSSASLSSSSSFSSAFSSATSLSAVGNVGYQLGLKVANSLGLGNAQALASQGILNAANAGSLASSFASALSASAGSVGNRSSAGPSAVGLGGVSAVPGFISATPVVGGPVTVNGQVLPAALQTALAPVVTSSGLASSAASARVSSLAQSIASAISSSGGTLSVPIFLNLLSSAGAQATASSSLSSSQVTSQVLLEGIAALLQVINGAQIRSVNLANVPNVQQALVSALSG

SEQ ID NO: 204 - protein, 654 aa, Araneus gemmoides
ASQSQAASQSQAAASAFRQAASQSASQSASRAGSQSSTKTTSTSTSGSQADSRSASSSASQASASAFAQQSSASLSSSSSFSSAFSSATSISAVGNVGYQLGLKVANSLGLGNAQALASSLSQAVSAVGVGASSNAYANAVSNAVGQVLAGQGILNAANAGSLASSFASALSSSAASVASQSASQSQAASQSQAAASAFRQAASQSASQSASRAGSQSSTKTTSTSTSGSQADSRSASSSASQASASAFAQQSSASLSSSSSFSSAFSSATSISAVGNVGYQLGLKVANSLGLGNAQALASSLSQAVSAVGVGASSNAYANAVSNAVGQVLAGQGILNAANAGSLASSFASALSSSAASVASQSASQSQAASQSQAAASAFRQAASQSASQSDSRAGSQSSTKTTSTSTSGSQADSRSASSSASQASASAFAQQSSASLSSSSSFSSAFSSATSISAVGNVGYQLGLKVANSLGLGNAQALASSLSQAVSAVGVGASSNAYANAVSNAVGQVLAGQGILNAANAGSLASSFASALSSSAASVASQSASQSQAASQSQAAASAFRQAASQSASQSASRAGSQSSTKTTSTSTSGSQADSRSASSSASQASASAFAQQSSASLSSSSSFSSAFSSATSISAVGNVGYQLGLKVANS

SEQ ID NO: 205 - protein, 376 aa, Argiope aurantia
STYANAVSNAVGQFLAGQGILNAANAGSLASSFASALSASAASVASSAAAQAASQSQAAASAFSRAASQSASQSAARSGAQSFSTTTTTSTAGSQAASQSASSAASQASASSFARASSASLAASSAFSSAFSSANSLSALGNVAYQLGFNVANTLGIGNAAGLGNALSQAVSSVGVGASSSTYANAVSNAVGQFLAGQGVLNAGNAGSLASSFANALSNSALSVGSRVSSPSYGALSPIAAGPNFISTGLNVGGPFTTLSQSLPTSLQTALAPIVSSSGLGSSAATARVRSLANSIASAISSSGGSLSVPAFLNLLSSVGAQVSSSSSLNSSEVTNEVLLEAIAALLQVINGGSITSVDLRNVPNAQQDLVNALSG

SEQ ID NO: 206 - protein, 545 aa, Argiope aurantia
TTTSTAGSQAASQFASSAASQASASSFARASSASLAASSSFSSAFSSANSLSALGNVGYQLGFNVANNLGIGNAAGLGNALSQAVSSVGVGASSSSYANAVSNAVGQLLAGQGILNAANAGSLASSFASALSASAASVASSAAAQAASQSQAAASAFSRAASQSASQSAARSGAQSISTTTTTSTAGSQAASQSASSAASQASASSFARASSASLAASSSFSSAFSSANSLSALGNVGYQLGFNVANNLGIGNAAGLGNALSQAVSSVGVGASSSTYANAVSNAVGQFLAGQGILNAANAGSLASSFASALSASAASVASSAAAQAASQSQAAASAFSRAASQSASQSAARSGAQSSSTTTTTSTAGSQAASQFASSAASQASASSFARASSASLAASSSFSSAFSSANSLSALGNVGYQLGFNVANNLGISNAAGLGNALSQAVSSVGVGASSSSYANAVSNAVGQFLAGQGILNAANAGSLASSFASALSASAASVASSAAAQAASQSQAAASAFSRAASQSASQSAARSGAQSSSTTTTTST

SEQ ID NO: 207 - protein, 3478 aa, Artificial Sequence
  Description of Artificial Sequence: Chimeric Molecule
MGKGRHDTNAKAKAMQMALASSIAELIVEESGGVNMQQKTNAAINALRNALRSTSGQVDEGFVSEIVELVNLFSQEQFNEVDTGSSMPYYQSSTGGGQGGAPIVTETVTVSVGGGGGGAPQPSGGGRSAAPQAGGQFYQPVAPSDPTGPLRPVSGGGAPSGGSGPITIVENLDITVGGAPGGGPGGAGPTGGGVSPGAPGGPGGPGGPGGPGGLGAGSTGGFYGPGTAGGGQPSGAPGGPGGPGGPGGPGAPGGPGGAGIGGGVGPGAGGVGGGAGGAGPVSVSSSVTVGGAGGPGAGGPGAGGPGAGGVGPGGLGGPGGFGGPGGPGGPGGPGAPGGPGAPGGGAGGLYGPGGAGGLYGPGGAGGLYRPGGAGAPGGPGGPGGFGGPGGFGGASGAGAGGVGPGGVSGGAGGSGPITVAETVTVGGAGGPGAGGVGGPSGPGAGGAPGGFGGPGGPGGPGGPGGPGGPGGAAGGAGAGGVGPGGGASGGAGGAGPVSVSSSVVVGGAGGPGGPGAGGVGPGGAGPGGIYGPGGAGGLYGPGAGGAFGPGGGAGGPGGPGGAGGPGGPGGPGGAGVSGGVVPVAGGAGGPGAGGVGPGGAGPGGIYGPGGAGGLYGPGAGGAFGPGGGPGAPGGPGGPGGPGGPGAPGGPGGAGIGGGVGPGAGGVGGGAGGAGPVSVSSSVTVGGAGGPGAGGPGAGGPGAGGVGPGGLGGPGGFGGPGGPGGPGGPGAPGGPGAPGGGAGGLYGPGGAGGLYGPGGAGGLYRPGGAGAPGGPGGPGGFGGPGGFGGASGAGAGGVGPGGVSGGAGGSGPITVAETVTVGGAGGPGAGGVGGPSGPGAGGAPGGFGGPGGPGGPGGPGGPGGPGGAAGGAGAGGVGPGGGASGGAGGAGPVSVSSSVVVGGAGGPGGPGAGGVGPGGAGPGGIYGPGGAGGLYGPGAGGAFGPGGGAGGPGGPGGAGGPGGPGGPGGAGVSGGVVPVAGGAAPGAGGVGPGGAGPGGIYGPGGAGGLYGPGAGGAFGPGGGPGAPGGPGGPGGPGGPGAPGGPGGAGIGGGVGPGAGGVGGGAGGAGPVSVSSSVTVGGAGGPGAGGPGAGGPGAGGVGPGGLGGPGGFGGPGGPGGPGGPGAPGGPGAPGGGAGGLYGPGGAGGLYGPGGAGGLYRPGGAGAPGGPGGPGGFGGPGGFGGASGAGAGGVGPGGVSGGAGGSGPITVAETVTVGGAGGPGAGGVGGPSGPGAGGAPGGFGGPGGPGGPGGPGGPGGPGGAAGGAGAGGVGPGGGASGGAGGAGPVSVSSSVVVGGAGGPGGPGAGGVGPGGAGPGGIYGPGGAGGLYGPGAGGAFGPGGGAGGPGGPGGAGGPGGPGGPGGAGVSGGVVPVAGGAGGPGAGGVGPGGAGPGGIYGPGGAGGLYGPGAGGAFGPGGGPGAPGGPGGPGGPGGPGAPGGPGGAGIGGGVGPGAGGVGGGAGGAGPVSVSSSVTVGGAGGPGAGGPGAGGPGAGGVGPGGLGGPGGFGGPGGPGGPGGPGAPGGPGAPGGGAGGLYGPGGAGGLYGPGGAGGLYRPGGAGAPGGPGGPGGFGGPGGFGGASGAGAGGVGPGGVSGGAGGSGPITVAETVTVGGAGGPGAGGVGGPSGPGAGGAPGGFGGPGGPGGPGGPGGPGGPGGAAGGAGAGGVGPGGGASGGAGGAGPVSVSSSVVVGGAGGPGGPGAGGVGPGGAGPGGIYGPGGAGGLYGPGAGGAFGPGGGAGGPGGPGGAGGPGGPGGPGGAGVSGGVVPVAGGAAPGAGGVGPGGAGPGGIYGPGGAGGLYGPGAGGAFGPGGGPGAPGGPGGPGGPGGPGAPGGPGGAGIGGGVGPGAGGVGGGAGGAGPVSVSSSVTVGGAGGPGAGGPGAGGPGAGGVGPGGLGGPGGFGGPGGPGGPGGPGAPGGPGAPGGGAGGLYGPGGAGGLYGPGGAGGLYRPGGAGAPGGPGGPGGFGGPGGFGGASGAGAGGVGPGGVSGGAGGSGPITVAETVTVGGAGGPGAGGVGGPSGPGAGGAPGGFGGPGGPGGPGGPGGPGGPGGAAGGAGAGGVGPGGGASGGAGGAGPVSVSSSVVVGGAGGPGGPGAGGVGPGGAGPGGIYGPGGAGGLYGPGAGGAFGPGGGAGGPGGPGGAGGPGGPGGPGGAGVSGGVVPVAGGAGGPGAGGVGPGGAGPGGIYGPGGAGGLYGPGAGGAFGPGGGPGAPGGPGGPGGPGGPGAPGGPGGAGIGGGVGPGAGGVGGGAGGAGPVSVSSSVTVGGAGGPGAGGPGAGGPGAGGVGPGGLGGPGGFGGPGGPGGPGGPGAPGGPGAPGGGAGGLYGPGGAGGLYGPGGAGGLYRPGGAGAPGGPGGPGGFGGPGGFGGASGAGAGGVGPGGVSGGAGGSGPITVAETVTVGGAGGPGAGGVGGPSGPGAGGAPGGFGGPGGPGGPGGPGGPGGPGGAAGGAGAGGVGPGGGASGGAGGAGPVSVSSSVVVGGAGGPGGPGAGGVGPGGAGPGGIYGPGGAGGLYGPGAGGAFGPGGGAGGPGGPGGAGGPGGPGGPGGAGVSGGVVPVAGGAAPGAGGVGPGGAGPGGIYGPGGAGGLYGPGAGGAFGPGGGPGAPGGPGGPGGPGGPGAPGGPGGAGIGGGVGPGAGGVGGGAGGAGPVSVSSSVTVGGAGGPGAGGPGAGGPGAGGVGPGGLGGPGGFGGPGGPGGPGGPGAPGGPGAPGGGAGGLYGPGGAGGLYGPGGAGGLYRPGGAGAPGGPGGPGGFGGPGGFGGASGAGAGGVGPGGVSGGAGGSGPITVAETVTVGGAGGPGAGGVGGPSGPGAGGAPGGFGGPGGPGGPGGPGGPGGPGGAAGGAGAGGVGPGGGASGGAGGAGPVSVSSSVVVGGAGGPGGPGAGGVGPGGAGPGGIYGPGGAGGLYGPGAGGAFGPGGGAGGPGGPGGAGGPGGPGGPGGAGVSGGVVPVAGGAGGPGAGGVGPGGAGPGGIYGPGGAGGLYGPGAGGAFGPGGGPGAPGGPGGPGGPGGPGAPGGPGGAGIGGGVGPGAGGVGGGAGGAGPVSVSSSVTVGGAGGPGAGGPGAGGPGAGGVGPGGLGGPGGFGGPGGPGGPGGPGAPGGPGAPGGGAGGLYGPGGAGGLYGPGGAGGLYRPGGAGAPGGPGGPGGFGGPGGFGGASGAGAGGVGPGGVSGGAGGSGPITVAETVTVGGAGGPGAGGVGGPSGPGAGGAPGGFGGPGGPGGPGGPGGPGGPGGAAGGAGAGGVGPGGGSSGGAGGAGPVSVSSSVVVSGAGGPSGPGAGGVGPGRAGPGGIYGPGGAGGLYGPGAGGSFGPGGGAGGPGGPGGAGGLGGPGGPGGAGVSGGVVPVAGGAAPGAGGSGPTTVTEVVSITVSGGQPSGGVLPGGSYTPAAGGSSRFPSLINGIMSSMQGGGFNYQNFGNVLSQFATGTGTCNSNDLNLLMDALLSALHTLSYQGMGTVPSYPSPSAMSAYSQSVRRCFGY

SEQ ID NO: 208 - protein, 617 aa, Nephila clavipes
AAAAAGGAGQGGYGGLGSQGAGRGGQGAGAAAAAAGGAGQGGYGGLGSQGAGRGGLGGQGAGAAAAAAAGGVGQGGLGGQGAGQGAGAAAAAAGGAGQGGYGGLGSQGAGRGGSGGQGAGAAAAAAGGAGQGGYGGLGSQGAGRGGLGGQGAGAAAAAAAGGAGQGGYGGLGGQGAGQGGYGGLGSQGAGRGGLGGQGAGAAAAAAAGGAGQGGLGGQGAGQGAGAAAAAAGGAGQGGYGGLGSQGAGRGGQGAGAAAAAAVGAGQGGYGGQGAGQGGYGGLGSQGAGRGGLGGQGAGAAAAAAAGGAGQGGLGGQGAGQGAGAAAAAAGGAGQGGYGGLGNQGAGRGGQGAAAAAAGGAGQGGYGGLGSQGAGRGGLGGQGAGAAAAAAGGAGQGGYGGLGGQGAGQGGYGGLGSQGSGRGGLGGQGAGAAAAAAGGAGQGGLGGQGAGQGAGAAAAAAGGVRQGGYGGLGSQGAGRGGQGAGAAAAAAGGAGQGGYGGLGGQGVGRGGLGGQGAGAAAAGGAGQGGYGGVGSGASAASAAASRLSSPQASSRVSSAVSNLVASGPTNSAALSSTISNVVSQIGASNPGLSGCDVLIQALLEVVSALIQILGSSSI

SEQ ID NO: 209 - protein, 547 aa, Artificial Sequence
  Description of Artificial Sequence: Chimeric Molecule
LPGGYGPGQQGPGGYGPGQQGPSGPGSAAAAARGDSGGYGPGQQGPGGYGPGQQGPSGPGSAAAAARGDSGGYGPGQQGPGGYGPGQQGPSGPGSAAAAARGDSGGYGPGQQGPGGYGPGQQGPSGPGSAAAAARGDSGGYGPGQQGPGGYGPGQQGPSGPGSAAAAARGDSGGYGPGQQGPGGYGPGQQGPSGPGSAAAAARGDSGGYGPGQQGPGGYGPGQQGPSGPGSAAAAARGDSGGYGPGQQGPGGYGPGQQGPSGPGSAAAAARGDSGGYGPGQQGPGGYGPGQQGPSGPGSAAAAARGDSGGYGPGQQGPGGYGPGQQGPSGPGSAAAAARGDSGGYGPGQQGPGGYGPGQQGPSGPGSAAAAARGDSGGYGPGQQGPGGYGPGQQGPSGPGSAAAAARGDSGGYGPGQQGPGGYGPGQQGPSGPGSAAAAARGDSGGYGPGQQGPGGYGPGQQGPSGPGSAAAAARGDSGGYGPGQQGPGGYGPGQQGPSGPGSAAAAARGDSGGYGPGQQGPGGYGPGQQGPSGPGSAAAAARGDSG

SEQ ID NO: 210 - protein, 932 aa, Latrodectus Hesperus
MFTFLGLISLLGVQIGIALGQGDVCFNKCLSRISGGCQSLIYTQVNPCAFQCTCDGVVTYHVEETFTKCGSRKLCYQGECLTEVPNRCERRYGYGYIGLLNPYNPCVFYCHNADVPCESFEENFVDGTTCYSSNSVIGQCLLGRCAEGGLTFSSGYIQGQRLPLEGQRFSIPRESSVVSAAGSAATAGQGGGNAANAASSAAASSSAAYNREGNRAGSSAAASAAGASSRQETVSSASTTTAAAARSFGGQRGINAENAAAAASGARAGQTGASSANVEATANAAARAGQAGGNSASADAAASAAARAGQAGGSSASADATASAAAKRGQYGGASGRTAGVSQSFGTAFSSRGQQGFSESSSQTESSSASQFNSGSRSSGRAVSSGITGNFGSANDAESFAASESESFAGQSAAGSRGAARGSARSQGGEFTSTFSDSESDVYASNYGSASRGSSRGSAASFGGRGFGVTNTESISNSESESFGSSSRAAGFSGAQGSSGLQYGRSGYGSGDGVGTSYQSIESDGFGSSIQGGGVSTSRADSFTANNYGTENNAISSGSSFASTSGGRRSNSVSAANSFASSNDNGRSNSIFNGGGRISSVSASNAGSFTGSREFGSYPRAGVGNNARFINGAGNNWSVSSMSGAGAFSGRRNSVYSGSSAGAAAGAHAASGGRAGAVAGAGAGASARAGAGARAAAGAGAGASAEAGAGARAAAGAGAGTGAGSGAGAAAGAGAAATSNAQAGAAVGSRGRASAGSRARAASFSEANTLAGAGASSNARAASFSGANALAGAGSRAGAEAQAGARAGAGAASEASAAASAEARAGARAGAGAASEASAAASAEANAGARAVAGAGASAGAESNAGAKAVTRGRARAAAGAGATASSSASSLASSLSEAASSSSSSSSSSSSSSFGESLASSAASAASALGA

SEQ ID NO: 211 - protein, 214 aa, Bombyx mori
MSKSVALLLLCACLASGRHVPTRARRQAGSFTVNSDGTSGAALKVPLTGNDKNVLSAIGSADFNDRHKLSAASAGLALDNVNGHGLSLTGTRIPGFGEQLGVAGKVNLFHNNNHDLSAKAFAIRNSPSAIPNAPNFNTLGGGVDYMFKQKVGASLSAAHSDVINRNDYSAGGKLNLFRSPSSSLDFNAGFKKFDTPFYRSSWEPNVGFSFSKFF

SEQ ID NO: 212 - DNA, 2232 bp, Homo sapiens
  CDS (1)..(2232)
atgagaggatcgcatcaccatcaccatcacggatccgcatgcgagctcggtaccatgaaccactcgccgctcaagaccgccttggcgtacgaatgcttccaggaccaggacaactccacgttggctttgccgtcggaccaaaagatgaaaacaggcacgtctggcaggcagcgcgtgcaggagcaggtgatgatgaccgtcaagcggcagaagtccaagtcttcccagtcgtccaccctgagccactccaatcgaggttccatgtatgatggcttggctgacaattacaactatgggaccaccagcaggagcagctactactccaagttccaggcagggaatggctcatggggatatccgatctacaatggaaccctcaagcgggagcctgacaacaggcgcttcagctcctacagccagatggagaactggagccggcactacccccggggcagctgtaacaccaccggcgcaggcagcgacatctgcttcatgcagaaaatcaaggcgagccgcagtgagcccgacctctactgtgacccacggggcaccctgcgcaagggcacgctgggcagcaagggccagaagaccacccagaaccgctacagcttttacagcacctgcagtggtcagaaggccataaagaagtgccctgtgcgcccgccctcttgtgcctccaagcaggaccctgtgtatatcccgcccatctcctgcaacaaggacctgtcctttggccactctagggccagctccaagatctgcagtgaggacatcgagtgcagtgggctgaccatccccaaggctgtgcagtacctgagctcccaggatgagaagtaccaggccattggggcctattacatccagcatacctgcttccaggatgaatctgccaagcaacaggtctatcagctgggaggcatctgcaagctggtggacctcctccgcagccccaaccagaacgtccagcaggccgcggcaggggccctgcgcaacctggtgttcaggagcaccaccaacaagctggagacccggaggcagaatgggatccgcgaggcagtcagcctcctgaggagaaccgggaacgccgagatccagaagcagctgactgggctgctctggaacctgtcttccactgacgagctgaaggaggaactcattgccgacgccctgcctgttctggccgaccgcgtcatcattcccttctctggctggtgcgatggcaatagcaacatgtcccgggaagtggtggaccctgaggtcttcttcaatgccacaggctgcttgaggaacctgagctcggccgatgcaggccgccagaccatgcgtaactactcagggctcattgattccctcatggcctatgtccagaactgtgtagcggccagccgctgtgacgacaagtctgtggaaaactgcatgtgtgttctgcacaacctctcctaccgcctggacgccgaggtgcccacccgctaccgccagctggagtataacgcccgcaacgcctacaccgagaagtcctccactggctgcttcagcaacaagagcgacaagatgatgaacaacaactatgactgccccctgcctgaggaagagaccaaccccaagggcagcggctggttgtaccattcagatgccatccgcacctacctgaacctcatgggcaagagcaagaaagatgctaccctggaggcctgtgctggtgccctgcagaacctgacagccagcaaggggctgatgtccagtggcatgagccagttgattgggctgaaggaaaagggcctgccacaaattgcccgcctcctgcaatctggcaactctgatgtggtgcggtccggagcctccctcctgagcaacatgtcccgccaccctctgctgcacagagtgatggggaaccaggtgttcccggaggtgaccaggctcctcaccagccacactggcaataccagcaactccgaagacatcttgtcctcggcctgctacactgtgaggaacctgatggcctcgcagccacaactggccaagcagtacttctccagcagcatgctcaacaacatcatcaacctgtgccgaagcagtgcctcacccaaggccgcagaagctgcccggcttctcctgtctgacatgtggtccagcaaggaactgcagggtgtcctcagacagcaaggtttcgataggaacatgctgggaaccttagctggggccaacagcctcaggaacttcacctcccgattc

SEQ ID NO: 213 - protein, 744 aa, Homo sapiens
MRGSHHHHHHGSACELGTMNHSPLKTALAYECFQDQDNSTLALPSDQKMKTGTSGRQRVQEQVMMTVKRQKSKSSQSSTLSHSNRGSMYDGLADNYNYGTTSRSSYYSKFQAGNGSWGYPIYNGTLKREPDNRRFSSYSQMENWSRHYPRGSCNTTGAGSDICFMQKIKASRSEPDLYCDPRGTLRKGTLGSKGQKTTQNRYSFYSTCSGQKAIKKCPVRPPSCASKQDPVYIPPISCNKDLSFGHSRASSKICSEDIECSGLTIPKAVQYLSSQDEKYQAIGAYYIQHTCFQDESAKQQVYQLGGICKLVDLLRSPNQNVQQAAAGALRNLVFRSTTNKLETRRQNGIREAVSLLRRTGNAEIQKQLTGLLWNLSSTDELKEELIADALPVLADRVIIPFSGWCDGNSNMSREVVDPEVFFNATGCLRNLSSADAGRQTMRNYSGLIDSLMAYVQNCVAASRCDDKSVENCMCVLHNLSYRLDAEVPTRYRQLEYNARNAYTEKSSTGCFSNKSDKMMNNNYDCPLPEEETNPKGSGWLYHSDAIRTYLNLMGKSKKDATLEACAGALQNLTASKGLMSSGMSQLIGLKEKGLPQIARLLQSGNSDVVRSGASLLSNMSRHPLLHRVMGNQVFPEVTRLLTSHTGNTSNSEDILSSACYTVRNLMASQPQLAKQYFSSSMLNNIINLCRSSASPKAAEAARLLLSDMWSSKELQGVLRQQGFDRNMLGTLAGANSLRNFTSRF

SEQ ID NO: 214 - DNA, 846 bp, Homo sapiens
  CDS (1)..(846)
atgaaccactcgccgctcaagaccgccttggcgtacgaatgcttccaggaccaggacaactccacgttggctttgccgtcggaccaaaagatgaaaacaggcacgtctggcaggcagcgcgtgcaggagcaggtgatgatgaccgtcaagcggcagaagtccaagtcttcccagtcgtccaccctgagccactccaatcgaggttccatgtatgatggcttggctgacaattacaactatgggaccaccagcaggagcagctactactccaagttccaggcagggaatggctcatggggatatccgatctacaatggaaccctcaagcgggagcctgacaacaggcgcttcagctcctacagccagatggagaactggagccggcactacccccggggcagctgtaacaccaccggcgcaggcagcgacatctgcttcatgcagaaaatcaaggcgagccgcagtgagcccgacctctactgtgacccacggggcaccctgcgcaagggcacgctgggcagcaagggccagaagaccacccagaaccgctacagcttttacagcacctgcagtggtcagaaggccataaagaagtgccctgtgcgcccgccctcttgtgcctccaagcaggaccctgtgtatatcccgcccatctcctgcaacaaggacctgtcctttggccactctagggccagctccaagatctgcagtgaggacatcgagtgcagtgggctgaccatccccaaggctgtgcagtacctgagctcccaggatgagaagtaccaggccattggggcctattacatccagcataccggatccagatctcatcaccatcaccatcac

SEQ ID NO: 215 - protein, 282 aa, Homo sapiens
MNHSPLKTALAYECFQDQDNSTLALPSDQKMKTGTSGRQRVQEQVMMTVKRQKSKSSQSSTLSHSNRGSMYDGLADNYNYGTTSRSSYYSKFQAGNGSWGYPIYNGTLKREPDNRRFSSYSQMENWSRHYPRGSCNTTGAGSDICFMQKIKASRSEPDLYCDPRGTLRKGTLGSKGQKTTQNRYSFYSTCSGQKAIKKCPVRPPSCASKQDPVYIPPISCNKDLSFGHSRASSKICSEDIECSGLTIPKAVQYLSSQDEKYQAIGAYYIQHTGSRSHHHHHH

SEQ ID NO: 216 - DNA, 30 bp, Artificial Sequence
  Description of Artificial Sequence: Primer
atgaaccactcgccgctcaagaccgccttg

SEQ ID NO: 217 - DNA, 30 bp, Artificial Sequence
  Description of Artificial Sequence: Primer
cgttcccggttctcctcaggaggctgactg

SEQ ID NO: 218 - DNA, 30 bp, Artificial Sequence
  Description of Artificial Sequence: Primer
ttagaatcgggaggtgaagttcctgaggct

SEQ ID NO: 219 - DNA, 27 bp, Artificial Sequence
  Description of Artificial Sequence: Primer
caccaccaacaagctggagacccggag

SEQ ID NO: 220 - DNA, 39 bp, Artificial Sequence
  Description of Artificial Sequence: Primer
ctcggtaccaaccactcgccgctcaagaccgccttggcg

SEQ ID NO: 221 - DNA, 39 bp, Artificial Sequence
  Description of Artificial Sequence: Primer
attaagcttttagaatcgggaggtgaagttcctgaggct

SEQ ID NO: 222 - DNA, 1854 bp, Artificial Sequence
  Description of Artificial Sequence: Chimeric Molecule
  CDS (1)..(1854)
atgagaggatcgcatcaccatcaccatcacggatccgcatgcgccgactctacgtcgaaaagcgcgccaaaaatcaacgaggaaaccgccgaaagacaattaaacgaattgataaacgtggacagtcacgatgagtacgagaataggctgagcaggatcagtagcgccctagcgaactggatgaaatcagttttcaatatggacaccacgaccaaggaggagttcgatcctgtttggctatcgatcgatgagtacaagagtcaggctaacgagagcatggcgaacgcttggcgcatcatcacgctgccgaactggacggtggagaagcgagggaccgtcaggggagacgtcgtggagtcaaggaaagttgaaggcttcggcaaggtttatagatttacgggcgtcgtcaactgtcccgccaggtttctatacgaggagttcaagaacaacctgacgaagttgcccgaatggaatccgacgatattgaaatgcgaaataattaaggaaatcggcgatggcgtggacctatcgtaccaggtgacggctggcgggggacgaggcataataacccctcgtgacttcgtgatcctgcgccggaccgcgctactctcccgggagggacgcgtcgtcgacgacaatccccacggatacatcagtagcggagtcagcgttcaagttccggggtatccgcccctcaaggagatggttaggggacacaataaagtcggttgctggtacctccagcctcggaccgtgcagactcctggaggaaaaatcgaggaccaggccctgttccaatggttgatgtgttgtgatctcaaaggtaaaatacctcaattcgtgttggacgtcgctttcgccactgtgatgctggactacatcgtgcacgtcaggaagttcgtggccgaagcgaaggccagagccgaaatcggtggtaccggaggttctgggggcgggccacatactggtctgctcttgctttcagtacagaagagaagcatgtccttccaaggaatcagacaacctgtgaccgtcactgagctagtagattctggtatattgagaccgtccactgtcaatgaactggaatctggtcagatttcttatgacgaggttggtgagagaattaaggacttcctccagggttcaagctgcatagcaggcatatacaatgagaccacaaaacagaagcttggcatttatgaggccatgaaaattggcttagtccgacctggtactgctctggagttgctggaagcccaagcagctactggctttatagtggatcctgttagcaacttgaggttaccagtggaggaagcctacaagagaggtctggtgggcattgagttcaaagagaagctcctgtctgcagaacgagctgtcactgggtataatgatcctgaaacaggaaacatcatctctttgttccaagccatgaataaggaactcatcgaaaagggccacggtattcgcttattagaagcacagatcgcaaccggggggatcattgacccaaaggagagccatcgtttaccagttgacatagcatataagaggggctatttcaatgaggaactcagtgagattctctcagatccaagtgatgataccaaaggattttttgaccccaacactgaagaaaatcttacctatctgcaactaaaagaaagatgcattaaggatgaggaaacagggctctgtcttctgcctctgaaagaaaagaagaaacaggtgcagacatcacaaaagaataccctcaggaagcgtagagtggtcatagttgacccagaaaccaataaagaaatgtctgttcaggagggggtcgacctgcagccaagcttaattagctga

SEQ ID NO: 223 - protein, 617 aa, Artificial Sequence
  Description of Artificial Sequence: Synthetic Construct
MRGSHHHHHHGSACADSTSKSAPKINEETAERQLNELINVDSHDEYENRLSRISSALANWMKSVFNMDTTTKEEFDPVWLSIDEYKSQANESMANAWRIITLPNWTVEKRGTVRGDVVESRKVEGFGKVYRFTGVVNCPARFLYEEFKNNLTKLPEWNPTILKCEIIKEIGDGVDLSYQVTAGGGRGIITPRDFVILRRTALLSREGRVVDDNPHGYISSGVSVQVPGYPPLKEMVRGHNKVGCWYLQPRTVQTPGGKIEDQALFQWLMCCDLKGKIPQFVLDVAFATVMLDYIVHVRKFVAEAKARAEIGGTGGSGGGPHTGLLLLSVQKRSMSFQGIRQPVTVTELVDSGILRPSTVNELESGQISYDEVGERIKDFLQGSSCIAGIYNETTKQKLGIYEAMKIGLVRPGTALELLEAQAATGFIVDPVSNLRLPVEEAYKRGLVGIEFKEKLLSAERAVTGYNDPETGNIISLFQAMNKELIEKGHGIRLLEAQIATGGIIDPKESHRLPVDIAYKRGYFNEELSEILSDPSDDTKGFFDPNTEENLTYLQLKERCIKDEETGLCLLPLKEKKKQVQTSQKNTLRKRRVVIVDPETNKEMSVQEGVDLQPSLIS

SEQ ID NO: 224 - protein, 9 aa, Artificial Sequence
  Description of Artificial Sequence: Mutagenized linker sequence of the nucleic acid molecule SEQ ID. No.: 222; Joining sequence between the nucleic acid molecules SEQ ID No.:165 and 171; Mutation of the protein sequence GGTGGSELE to GGTGGSGGG
GGTGGSGGG

SEQ ID NO: 225 - DNA, 36 bp, Artificial Sequence
  Description of Artificial Sequence: Primer
agatctcatcaccatcaccatcacgagccacatact

SEQ ID NO: 226 - DNA, 48 bp, Artificial Sequence
  Description of Artificial Sequence: Primer
agatctagttcctccggtaccgccgctaattaagcttggctgcaggtc

SEQ ID NO: 227 - DNA, 2670 bp, Artificial Sequence
  Description of Artificial Sequence: Chimeric Molecule
  CDS (1)..(2670)
atggctagcatgactggtggacagcaaatgggtcgcggatctcatcaccatcaccatcacgagccacatactggtctgctcttgctttcagtacagaagagaagcatgtccttccaaggaatcagacaacctgtgaccgtcactgagctagtagattctggtatattgagaccgtccactgtcaatgaactggaatctggtcagatttcttatgacgaggttggtgagagaattaaggacttcctccagggttcaagctgcatagcaggcatatacaatgagaccacaaaacagaagcttggcatttatgaggccatgaaaattggcttagtccgacctggtactgctctggagttgctggaagcccaagcagctactggctttatagtggatcctgttagcaacttgaggttaccagtggaggaagcctacaagagaggtctggtgggcattgagttcaaagagaagctcctgtctgcagaacgagctgtcactgggtataatgatcctgaaacaggaaacatcatctctttgttccaagccatgaataaggaactcatcgaaaagggccacggtattcgcttattagaagcacagatcgcaaccggggggatcattgacccaaaggagagccatcgtttaccagttgacatagcatataagaggggctatttcaatgaggaactcagtgagattctctcagatccaagtgatgataccaaaggattttttgaccccaacactgaagaaaatcttacctatctgcaactaaaagaaagatgcattaaggatgaggaaacagggctctgtcttctgcctctgaaagaaaagaagaaacaggtgcagacatcacaaaagaataccctcaggaagcgtagagtggtcatagttgacccagaaaccaataaagaaatgtctgttcaggagggggtcgacctgcagccaagcttaattagcggcggtaccggaggaactagatccatgggttctagcgcggctgcagccgcggcagctgcgtccggcccgggtggctacggtccggaaaaccagggtccatctggcccgggtggctacggtcctggcggtccgggttctagcgcggctgcagccgcggcagctgcgtccggcccgggtggctacggtccggaaaaccagggtccatctggcccgggtggctacggtcctggcggtccgggttctagcgcggctgcagccgcggcagctgcgtccggcccgggtggctacggtccggaaaaccagggtccatctggcccgggtggctacggtcctggcggtccgggttctagcgcggctgcagccgcggcagctgcgtccggcccgggtggctacggtccggaaaaccagggtccatctggcccgggtggctacggtcctggcggtccgggttctagcgcggctgcagccgcggcagctgcgtccggcccgggtggctacggtccggaaaaccagggtccatctggcccgggtggctacggtcctggcggtccgggttctagcgcggctgcagccgcggcagctgcgtccggcccgggtggctacggtccggaaaaccagggtccatctggcccgggtggctacggtcctggcggtccgggttctagcgcggctgcagccgcggcagctgcgtccggcccgggtggctacggtccggaaaaccagggtccatctggcccgggtggctacggtcctggcggtccgggttctagcgcggctgcagccgcggcagctgcgtccggcccgggtggctacggtccggaaaaccagggtccatctggcccgggtggctacggtcctggcggtccgggttctagcgcggctgcagccgcggcagctgcgtccggcccgggtggctacggtccggaaaaccagggtccatctggcccgggtggctacggtcctggcggtccgggttctagcgcggctgcagccgcggcagctgcgtccggcccgggtggctacggtccggaaaaccagggtccatctggcccgggtggctacggtcctggcggtccgggttctagcgcggctgcagccgcggcagctgcgtccggcccgggtggctacggtccggaaaaccagggtccatctggcccgggtggctacggtcctggcggtccgggttctagcgcggctgcagccgcggcagctgcgtccggcccgggtggctacggtccggaaaaccagggtccatctggcccgggtggctacggtcctggcggtccgggttctagcgcggctgcagccgcggcagctgcgtccggcccgggtggctacggtccggaaaaccagggtccatctggcccgggtggctacggtcctggcggtccgggttctagcgcggctgcagccgcggcagctgcgtccggcccgggtggctacggtccggaaaaccagggtccatctggcccgggtggctacggtcctggcggtccgggttctagcgcggctgcagccgcggcagctgcgtccggcccgggtggctacggtccggaaaaccagggtccatctggcccgggtggctacggtcctggcggtccgggttctagcgcggctgcagccgcggcagctgcgtccggcccgggtggctacggtccggaaaaccagggtccatctggcccgggtggctacggtcctggcggtccgggctaa

SEQ ID NO: 228 - protein, 889 aa, Artificial Sequence
  Description of Artificial Sequence: Synthetic Construct
MASMTGGQQMGRGSHHHHHHEPHTGLLLLSVQKRSMSFQGIRQPVTVTELVDSGILRPSTVNELESGQISYDEVGERIKDFLQGSSCIAGIYNETTKQKLGIYEAMKIGLVRPGTALELLEAQAATGFIVDPVSNLRLPVEEAYKRGLVGIEFKEKLLSAERAVTGYNDPETGNIISLFQAMNKELIEKGHGIRLLEAQIATGGIIDPKESHRLPVDIAYKRGYFNEELSEILSDPSDDTKGFFDPNTEENLTYLQLKERCIKDEETGLCLLPLKEKKKQVQTSQKNTLRKRRVVIVDPETNKEMSVQEGVDLQPSLISGGTGGTRSMGSSAAAAAAAASGPGGYGPENQGPSGPGGYGPGGPGSSAAAAAAAASGPGGYGPENQGPSGPGGYGPGGPGSSAAAAAAAASGPGGYGPENQGPSGPGGYGPGGPGSSAAAAAAAASGPGGYGPENQGPSGPGGYGPGGPGSSAAAAAAAASGPGGYGPENQGPSGPGGYGPGGPGSSAAAAAAAASGPGGYGPENQGPSGPGGYGPGGPGSSAAAAAAAASGPGGYGPENQGPSGPGGYGPGGPGSSAAAAAAAASGPGGYGPENQGPSGPGGYGPGGPGSSAAAAAAAASGPGGYGPENQGPSGPGGYGPGGPGSSAAAAAAAASGPGGYGPENQGPSGPGGYGPGGPGSSAAAAAAAASGPGGYGPENQGPSGPGGYGPGGPGSSAAAAAAAASGPGGYGPENQGPSGPGGYGPGGPGSSAAAAAAAASGPGGYGPENQGPSGPGGYGPGGPGSSAAAAAAAASGPGGYGPENQGPSGPGGYGPGGPGSSAAAAAAAASGPGGYGPENQGPSGPGGYGPGGPGSSAAAAAAAASGPGGYGPENQGPSGPGGYGPGGPG
